(19) United States
(12) Patent Application Publication
(10) Pub. No.: US 2025/0376674 A1
(43) Pub. Date: Dec. 11, 2025

(54) SPLIT PRIME EDITORS

(71) Applicant: Prime Medicine, Inc., Cambridge, MA (US)

(72) Inventors: Andrew V. Anzalone, Cambridge, MA (US); Christopher Wilson, Waltham, MA (US)

(21) Appl. No.: 18/877,108

(22) PCT Filed: Jun. 23, 2023
(86) PCT No.: PCT/US2023/026128

§ 371 Date: Dec. 19, 2024

Related U.S. Application Data
(60) Provisional application No. 63/354,844, filed on Jun. 23, 2022.

(51) Int. Cl. C12N 15/10; C12N 9/12; C12N 9/22; C12N 15/11; C12N 15/86

(52) U.S. Cl. CPC C12N 15/102; C12N 9/1276; C12N 9/226; C12N 15/111; C12N 15/86; C07K 2319/09; C07K 2319/30; C12N 2750/14143; C12N 2840/445

(57) ABSTRACT

Provided herein are compositions and methods related split prime editors.

### CROSS REFERENCE TO RELATED APPLICATIONS

[0001] This application is a § 371 national-stage application based on PCT/US23/26128, filed Jun. 23, 2023, which claims the benefit of U.S. Provisional Application No. 63/354,844, filed Jun. 23, 2022, the entire contents of each are hereby incorporated by reference.

### REFERENCE TO A SEQUENCE LISTING

[0002] This application contains a Sequence Listing which has been submitted electronically in XML format. The Sequence Listing XML is incorporated herein by reference. Said XML file, created on Jul. 24, 2023, is named PMB-00525_SL.xml and is 2,648,524 bytes in size.

### BACKGROUND

[0003] Prime editing is a gene editing technology that allows researchers to make nucleotide substitutions, insertions, deletions, or combinations thereof in the DNA of cells. Prime editing can be used to correct disease associated gene mutations, and can be used for treating disease with a genetic component. There is a need for split prime editors that have desirable properties, such as the ability to facilitate prime editing with improved efficiency.

### SUMMARY

[0004] Provided herein are split prime editors useful in prime editing, as well as methods of using and making such split prime editors.

[0005] In certain aspects, prime editor systems comprise a split prime editor comprising a DNA binding domain and a DNA polymerase domain, wherein the split prime editor comprises a first polypeptide comprising a first amino acid sequence and a second polypeptide comprising a second amino acid sequence.

[0006] In some embodiments, the first amino acid sequence forms at least a portion of the DNA binding domain. In some embodiments, the second amino acid sequence forms at least a portion of the DNA polymerase domain. In some embodiments, the first amino acid sequence forms the DNA binding domain. In some embodiments, the first amino acid sequence forms the DNA binding domain and a portion of the DNA polymerase domain. In some embodiments, the second amino acid sequence forms the DNA polymerase domain. In some embodiments, the second amino acid sequence forms the DNA polymerase domain and a portion of the DNA binding domain.

[0007] In some embodiments, the first amino acid sequence forms at least a portion of the DNA polymerase domain. In some embodiments, the second amino acid sequence forms at least a portion of the DNA binding domain. In some embodiments, the first amino acid sequence forms the DNA polymerase domain. In some embodiments, the first amino acid sequence forms the DNA polymerase domain and a portion of the DNA binding domain. In some embodiments, the second amino acid sequence forms the DNA binding domain. In some embodiments, the second amino acid sequence forms the DNA binding domain and a portion of the DNA polymerase domain.

[0008] In certain embodiments, the first polypeptide and the second polypeptide are configured to passively assemble in a host cell to form the split prime editor. In some embodiments, the first polypeptide has affinity for the second polypeptide. In some embodiments, the second polypeptide has affinity for the first polypeptide.

[0009] In some embodiments, the first polypeptide comprises a single-domain antibody (e.g., a single-domain antibody comprising an amino acid sequence as set forth in Table 17). In certain embodiments, the single-domain antibody is a NANOBODY®. In some embodiments, the second polypeptide comprises a peptide tag that is configured to be bound by the single domain antibody. In certain embodiments, the peptide tag comprises a SpotTag® or a BC2 tag. In some embodiments, the peptide tag comprises an amino acid sequence as set forth in Table 16.

[0010] In certain embodiments, the first polypeptide comprises a peptide tag that is configured to be bound by a single domain antibody. In some embodiments, the peptide tag comprises a SpotTag® or a BC2 tag. In some embodiments, the peptide tag comprises an amino acid sequence as set forth in Table 16. In certain embodiments, the second polypeptide comprises a single-domain antibody (e.g., a single-domain antibody comprising an amino acid sequence as set forth in Table 17). In certain embodiments, the single-domain antibody is a NANOBODY®.

[0011] In certain embodiments, the split prime editor further comprises an affinity moiety that has affinity for either the DNA binding domain or the DNA polymerase domain. In some embodiments, the affinity moiety has affinity for the DNA binding domain. In some embodiments, the affinity moiety has affinity for the DNA polymerase domain. In some embodiments, the DNA binding domain comprises a peptide tag that is configured to bind to the affinity moiety and the DNA polymerase domain comprises the affinity moiety. In some embodiments, the DNA binding domain comprises the affinity moiety and the DNA polymerase domain comprises a peptide tag that is configured to bind to the affinity moiety. In some embodiments, the affinity moiety comprises an antibody or fragment thereof (e.g., a single domain antibody or a NANOBODY®). In some embodiments, the single-domain antibody comprises any one of the amino acid sequences as set forth in Table 17.

[0012] In some embodiments, the affinity moiety is fused to the first polypeptide and has affinity for the second amino acid sequence. In some embodiments, the affinity moiety is fused to the second polypeptide and has affinity for the first amino acid sequence. In some embodiments, the first polypeptide comprises a C-terminal intein sequence. In some embodiments, the second polypeptide comprises a N-terminal intein sequence. In some embodiments, assembly of the first polypeptide and the second polypeptide in a host cell results in fusion of the C-terminal intein sequence and the N-terminal intein sequence to generate a full intein sequence, which then results in splicing and excision of the full intein sequence. In certain embodiments, the first polypeptide comprises a first affinity moiety and the second polypeptide comprises a second affinity moiety. In some embodiments, the first affinity moiety has affinity for the second affinity moiety. In some embodiments, the first affinity moiety comprises a C-terminal leucine zipper monomer. In some embodiments, the second affinity moiety comprises an N-terminal leucine zipper monomer. In some embodiments, the C-terminal leucine zipper monomer and the N-terminal leucine zipper monomer forms a dimer in a host cell. In some embodiments, the first affinity moiety comprises a C-terminal dimerization domain. In some embodiments, the second affinity moiety comprises a N-terminal dimerization domain. In some embodiments, the C-terminal dimerization domain and the N-terminal dimerization domain form a dimer in a host cell.

[0013] In certain embodiments, the prime editor system comprises a scaffold RNA. In some embodiments, the first polypeptide and/or the second polypeptide comprises an adapter protein that has affinity for the scaffold RNA. Exemplary adapter proteins may include a MS2 coat/adapter protein (MCP), a PP7 adapter protein, a Qβ adapter protein, a F2 adapter protein, a GA adapter protein, a fr adapter protein, a JP501 adapter protein, a M12 adapter protein, a R17 adapter protein, a BZ13 adapter protein, a JP34 adapter protein, a JP500 adapter protein, a KU1 adapter protein, a M11 adapter protein, a MX1 adapter protein, a TW18 adapter protein, a VK adapter protein, a SP adapter protein, a FI adapter protein, a ID2 adapter protein, a NL95 adapter protein, a TW19 adapter protein, a AP205 adapter protein, a ϕCb5 adapter protein, a ϕCb8r adapter protein, a ϕ12r adapter protein, a ϕCb23r adapter protein, a 7s adapter protein and a PRR1 adapter protein.

[0014] In certain embodiments, the prime editor system further comprises a scaffold protein that has affinity for the first polypeptide and/or the second polypeptide. In some embodiments, the scaffold protein is fused to the first polypeptide or the second polypeptide. In some embodiments, the scaffold protein is not fused to either the first polypeptide or the second polypeptide. In some embodiments, the prime editor system further comprises a second scaffold protein that has affinity for the scaffold protein. In some embodiments, the second scaffold protein has affinity for the first polypeptide. In some embodiments, the second scaffold protein has affinity for to the second polypeptide. In some embodiments, the second scaffold protein is fused to the first polypeptide or the second polypeptide. In some embodiments, the second scaffold protein is not fused to either the first polypeptide or the second polypeptide.

[0015] In certain embodiments, the first polypeptide has affinity for an endogenous protein in a host cell. In some embodiments, the second polypeptide has affinity for the endogenous protein in a host cell.

[0016] In certain embodiments, the first polypeptide has affinity for a first endogenous protein in a host cell and the second polypeptide has affinity for a second endogenous protein in a host cell, and the first endogenous protein has affinity for the second endogenous protein.

[0017] In certain embodiments, the first polypeptide is configured to become covalently attached to the second polypeptide in a host cell. In some embodiments, the first polypeptide comprises a SpyTag peptide sequence and the second polypeptide comprises a SpyCatcher peptide sequence. In some embodiments, wherein the first polypeptide comprises a SnoopTag peptide sequence and the second polypeptide comprises a SnoopCatcher peptide sequence. In some embodiments, the first polypeptide comprises a SdyTag peptide sequence and the second polypeptide comprises a SdyCatcher peptide sequence. In some embodiments, the first polypeptide comprises a DogTag peptide sequence and the second polypeptide comprises a DogCatcher peptide sequence. In some embodiments, the first polypeptide comprises a SpyTag peptide sequence and the second polypeptide comprises a SpyDock peptide sequence. In some embodiments, the first polypeptide comprises an isopeptag peptide sequence and the second polypeptide comprises a Pilin-C peptide sequence.

[0018] In certain embodiments, the split prime editor comprises a third polypeptide encoding a third amino acid sequence. In some embodiments, the third amino acid sequence forms at least a portion of the DNA binding domain and/or the DNA polymerase domain.

[0019] In certain embodiments, the DNA binding domain comprises a CRISPR associated (Cas) protein domain. In some embodiments, the Cas protein domain is a Cas9. In some embodiments, the Cas9 comprises a mutation in an HNH domain. In some embodiments, the Cas protein domain has nickase activity. In some embodiments, the Cas9 comprises a H840A mutation in the HNH domain. In some embodiments, the Cas protein domain is a Cas12b. In some embodiments, the Cas protein domain is a Cas 12a, Cas12b, Cas12c, Cas12d, Cas12e, Cas14a, Cas14b, Cas14c, Cas14d, Cas14c, Cas 14f, Cas14g, Cas 14h, Cas 14u, or a Casφ. In some embodiments, the Cas protein domain comprises any one of the amino acid sequences as set forth in Table 14.

[0020] In some embodiments, the DNA polymerase domain comprises a reverse transcriptase. Many reverse transcriptase enzymes have DNA-dependent DNA synthesis abilities in addition to RNA-dependent DNA synthesis abilities, i.e., reverse transcription). In some embodiments, the reverse transcriptase is a retrovirus reverse transcriptase. In some embodiments, the reverse transcriptase is a Moloney murine leukemia virus (M-MLV) reverse transcriptase. In some embodiments, the reverse transcriptase comprises any one of the sequences as set forth in Table 11, Table 12, or Table 13.

[0021] In some embodiments provided herein, the first polypeptide and/or the second polypeptide comprises at least one peptide linker (e.g., at least two peptide linkers). In certain embodiments, the at least one peptide linker comprises 5 to 100 amino acids. In some embodiments, the at least one peptide linker comprises an amino acid sequence as set forth in Table 15.

[0022] In certain embodiments, the first polypeptide and/or the second polypeptide further comprises at least one nuclear localization sequence. In some embodiments, the at least one nuclear localization sequence comprises an amino acid sequence as set forth in Table 3.

[0023] In some embodiments, the first polypeptide and the second polypeptide are joined by a self-cleaving peptide. In some embodiments, the self-cleaving peptide is a P2A peptide (e.g., a P2A peptide comprising a sequence set forth in SEQ ID NO: 8004).

[0024] In certain embodiments, the prime editor comprises an amino acid sequence as set forth in Table 18. In certain embodiments, the prime editor comprises an amino acid sequence as set forth in Table 20 and/or Table 21. In certain embodiments, the first and/or second polypeptides comprise an amino acid sequence as set forth in Table 20. In certain embodiments, the first and/or second polypeptides comprise an amino acid sequence as set forth in Table 21.

[0025] In some aspects, provided herein is a split prime editing system comprising A) a first polypeptide, or a polynucleotide encoding the first polypeptide, the first polypeptide comprising a DNA binding domain fused to a first affinity moiety selected from: i) a single-domain antibody sequence, or ii) a peptide tag; and B) a second polypeptide, or a polynucleotide encoding the second polynucleotide, the second polynucleotide comprising a DNA polymerase domain fused to a second affinity moiety that is: i) the peptide tag if the DNA binding domain is fused to the single-domain antibody sequence, or ii) the single-domain antibody sequence if the DNA binding domain is fused to the peptide tag; wherein the peptide tag is an antigen for which the single-domain antibody sequence has sufficient affinity to bind under physiological conditions.

[0026] In some embodiments, the DNA binding domain comprises an HNH domain and/or a RuvC domain. In some embodiments, the DNA binding domain comprises both an HNH domain and a RuvC domain. In some embodiments, the DNA binding domain. In some embodiments, the DNA binding protein comprises a mutation that decreases or eliminates nuclease activity in the RuvC domain. The DNA binding domain may be a Type II Cas protein, such as a Cas9 protein. The Cas9 protein may be a Cas9 nickase. In some embodiments, the DNA binding domain is a Type V Cas protein. In other embodiments, the DNA binding domain is a Cas12 protein. In some embodiments, the DNA binding domain has a sequence with at least 80%, 85%, 90%, 95%, 96%, 97%, 98%, or 99% identity to a sequence from Table 14. In some embodiments, the DNA binding domain has a sequence from Table 14. In some embodiments, the sequence is a Cas9 nickase sequence from Table 8000.

[0027] In some embodiments, the DNA polymerase domain is a reverse transcriptase domain, such as a Maloney Murine Leukemia Virus (MMLV) reverse transcriptase. In some embodiments, the DNA polymerase domain comprises a sequence with at least 80%, 85%, 90%, 95%, 96%, 97%, 98%, or 99% identity to a sequence from Table 11, Table 12, or Table 13. In some embodiments, the DNA polymerase domain comprises a sequence from Table 11, Table 12, or Table 13.

[0028] In some embodiments, the DNA polymerase domain comprises a sequence having at least 80%, 85%, 90%, 95%, 96%, 97%, 98%, 99%, or 100% identity to SEQ ID NO: 4448 or SEQ ID NO: 8001.

[0029] In some embodiments, the single-domain antibody sequence has at least 80%, 85%, 90%, 95%, 96%, 97%, 98%, or 99% identity to SEQ ID NO: 8002. In some embodiments, the single-domain antibody sequence is SEQ ID NO: 8002.

[0030] In some embodiments, the peptide tag has a sequence from Table 16 or a sequence with 1 or 2 substitutions relative to a sequence from Table 16. In other embodiments, the peptide tag has a sequence from Table 16.

[0031] In some embodiments, the peptide tag is SEQ ID NO: 8003. In some embodiments, the DNA binding domain is located N-terminally to the first affinity moiety.

[0032] In some embodiments, the system further comprises a first peptide linker between the DNA binding domain and the first affinity moiety. In some embodiments, the first peptide linker comprises a sequence from Table 15. In some embodiments, the DNA polymerase domain is located C-terminally to the second affinity moiety. The system, as disclosed herein, may further comprise a second peptide linker between the DNA polymerase domain and the second affinity moiety (e.g., a second peptide linker comprising a sequence from Table 15).

[0033] In some embodiments, the first polypeptide further comprises one or more nuclear localization sequences (NLSs). The first polypeptide may comprise a C-terminal and an N-terminal NLS. The first polypeptide may further comprise a peptide linker between the N-terminal NLS and the DNA binding protein. In some embodiments, the peptide linker between the C-terminal NLS and the first binding moiety.

[0034] In some embodiments, the second polypeptide further comprises one or more nuclear localization sequences (NLSs). The second polypeptide may comprise a C-terminal and an N-terminal NLS. In some embodiments, a peptide linker is between the C-terminal NLS and the DNA polymerase domain. In some embodiments, a peptide linker between the N-terminal NLS and the second binding moiety. The NLS may have, individually, a sequence selected from Table 3 or a sequence having one or two substitutions relative to a sequence from Table 3.

[0035] In some embodiments, the peptide linkers have, individually, a sequence selected from Table 15 or a sequence having at least 80%, 85%, 90%, 95%, 96%, 97%, 98%, or 99% identity with a sequence from Table 15.

[0036] In some embodiments, the first polypeptide and the second polypeptide comprise compatible sequences from Table 21 or Table 20 or sequences having at least 80%, 85%, 90%, 95%, 96%, 97%, 98%, or 99% identity with compatible sequence from Table 21 or Table 20.

[0037] In some embodiments, the system further comprises a self-cleaving peptide joining the first polypeptide to the second polypeptide, such as a self-cleaving peptide comprising a sequence from Table 19 or a sequence having one or two substitutions relative to a sequence from Table 19. The self cleaving peptide may be a P2A peptide and comprise a sequence set forth in Table 19. In some embodiments, the self-cleaving peptide comprises SEQ ID NO: 8004.

[0038] In some embodiments, the system comprises a sequence having 80%, 85%, 90%, 95%, 96%, 97%, 98%, or 99% identity relative to a sequence from Table 18. In some embodiments, the system comprises a sequence selected from Table 18. In some embodiments, the sequence from Table 18 is SEQ ID NO: 8005 as set forth in Table 18.

[0039] In certain aspects, provided herein are lipid nanoparticles (LNPs) or ribonucleoproteins (RNPs) comprising a prime editing system described herein or a component thereof.

[0040] In certain aspects, provided herein are polynucleotides encoding a prime editor described herein. In some embodiments, the polynucleotide is operably linked to a regulatory element. In some embodiments, the regulatory element is an inducible regulatory element.

[0041] In certain aspects, provided herein are vectors (e.g., AAV vectors) comprising a polynucleotide described above.

[0042] In certain aspects, provided herein are polynucleotides encoding the first polypeptide described herein. In some embodiments, the polynucleotide is operably linked to a regulatory element. In some embodiments, the regulatory element is an inducible regulatory element.

[0043] In certain aspects, provided herein are vectors comprising a polynucleotide described above. In some embodiments, the vector is an AAV vector, such as a trans-splicing vector.

[0044] In certain aspects, provided herein are polynucleotides encoding the second polypeptide described herein. In some embodiments, the polynucleotide is operably linked to a regulatory element. In some embodiments, the regulatory element is an inducible regulatory element.

[0045] In certain aspects, provided herein are vectors comprising a polynucleotide described above. In some embodiments, the vector is an AAV vector trans-splicing vector.

[0046] In certain aspects, provided herein are kits comprising a first polynucleotide and a second polynucleotide, wherein the first polynucleotide is a polynucleotide described herein and the second polynucleotide is a polynucleotide described herein. In some embodiments, the first polynucleotide and/or the second polynucleotide is in a vector. In some embodiments, the vector is an AAV vector. In some embodiments, the vector is an AAV vector, such as trans-splicing vector.

[0047] In certain aspects, provided herein are isolated cells (e.g., human cells) comprising a prime editor system described herein, a LNP or RNP described herein, a polynucleotide described herein, or a vector described herein.

[0048] In certain aspects, provided herein are pharmaceutical compositions comprising i) a prime editor system described herein, a LNP or RNP described herein, a polynucleotide described herein, or a vector described herein; and (ii) a pharmaceutically acceptable carrier.

[0049] In certain embodiments, the prime editor systems described herein further comprise a prime editor guide RNA (a PEgRNA).

[0050] In certain aspects, provided herein are methods for editing a gene, the method comprising contacting the gene with a prime editor system described herein, wherein the PEgRNA directs the prime editor to incorporate the intended nucleotide edit in the gene, thereby editing the gene. In some embodiments, the prime editor synthesizes a single stranded DNA encoded by an editing template, wherein the single stranded DNA replaces an editing target sequence and results in incorporation of the intended nucleotide edit into a region corresponding to the editing target sequence in the gene. In some embodiments, the gene is in a cell (e.g., a mammalian cell (e.g., a human cell)). In some embodiments, the cell is in a subject (e.g., human).

[0051] In certain embodiments, the method further comprises administering the cell to a subject after incorporation of the intended nucleotide edit.

### BRIEF DESCRIPTION OF THE DRAWINGS

[0052] FIG. 1 is a schematic diagram showing an exemplary split prime editor. The split prime editor includes an spCas9, a Moloney Murine Leukemia Virus (MMLV) reverse transcriptase (RT), a Spot-Tag® (shown in uppercase, bold, and underlined), simian virus 40 (SV40) nuclear localization sequences (NLS) (shown in uppercase and italicized), a self-cleaving sequence P2A (shown in uppercase and underlined), a NANOBODY® sequence (shown in uppercase and bold), and intervening linkers (shown in lowercase). FIG. 1 discloses SEQ ID NOS 8703 and 8780-8781, respectively, in order of appearance.

[0053] FIG. 2 is a schematic diagram showing an exemplary split prime editor. The split prime editing system includes an spCas9, a Moloney Murine Leukemia Virus (MMLV) reverse transcriptase (RT), a Spot-Tag® (shown in uppercase, bold, and underlined), simian virus 40 (SV40) nuclear localization sequences (NLS) (shown in uppercase and italicized), a self-cleaving sequence P2A (shown in uppercase and underlined), a NANOBODY® sequence (shown in bold), and intervening linkers (shown in lowercase). FIG. 2 discloses SEQ ID NOS 8703, 8782 and 8781, respectively, in order of appearance.

[0054] FIG. 3 is a schematic diagram showing an exemplary split prime editor. The split prime editor includes an spCas9, a Moloney Murine Leukemia Virus (MMLV) reverse transcriptase (RT), also including a BC2 peptide (shown in uppercase, bold, and underlined), simian virus 40 (SV40) nuclear localization sequences (NLS) (shown in uppercase and italicized), a self-cleaving sequence P2A (shown in uppercase and underlined), a NANOBODY® sequence (shown in bold), and intervening linkers (shown in lowercase). FIG. 3 discloses SEQ ID NOS 8703, 8783 and 8781, respectively, in order of appearance.

[0055] FIG. 4 is a schematic diagram showing an exemplary split prime editor. The split prime editor includes an spCas9, a Moloney Murine Leukemia Virus (MMLV) reverse transcriptase (RT), and also includes a BC2 (shown in uppercase, bold, and underlined), simian virus 40 (SV40) nuclear localization sequences (NLS) (shown in uppercase and italicized), a self-cleaving sequence P2A (shown in uppercase and underlined), a NANOBODY® sequence (shown in bold), and intervening linkers (shown in lowercase). FIG. 4 discloses SEQ ID NOS 8703, 8784 and 8781, respectively, in order of appearance.

[0056] FIG. 5 is a graph showing percent editing of a target gene site (Fanconi anemia complementation group F (FANCF) gene site) by various exemplary configurations of the split prime editing systems. Gene editing activity for each of the split prime editing constructs (Cas9-BC2 NANOBODY®-MMLV, Cas9-NANOBODY® BC2-MMLV, Cas9-SpotTag® NANOBODY®-MMLV, and Cas9-NANOBODY® SpotTag®-MMLV) was compared to a control (fused) prime editor (PE2).

### DETAILED DESCRIPTION

[0057] Provided herein, in some embodiments, are compositions and methods related to split prime editors useful, for example, in prime editing applications. In certain embodiments, provided herein are compositions and methods for introducing intended nucleotide edits in target DNA, e.g., introducing a prime editing system comprising split prime editors. Compositions provided herein can comprise split prime editors comprising a DNA binding domain and a DNA polymerase domain (e.g., the split prime editor comprises a first polypeptide comprising a first amino acid sequence and a second polypeptide comprising a second amino acid sequence).

[0058] The following description and examples illustrate embodiments of the present disclosure in detail. It is to be understood that this disclosure is not limited to the particular embodiments described herein and as such can vary. Those of skill in the art will recognize that there are numerous variations and modifications of this disclosure, which are encompassed within its scope. Although various features of the present disclosure can be described in the context of a single embodiment, the features can also be provided separately or in any suitable combination. Conversely, although the present disclosure can be described herein in the context of separate embodiments for clarity, the present disclosure can also be implemented in a single embodiment.

### Definitions

[0059] Unless defined otherwise, all technical and scientific terms used herein have the same meaning as is commonly understood by one of ordinary skill in the art.

[0060] The terminology used herein is for the purpose of describing particular embodiments only and is not intended to be limiting. As used herein, the singular forms “a”, “an” and “the” are intended to include the plural forms as well, unless the context clearly indicates otherwise. Furthermore, to the extent that the terms “including”, “includes”, “having”, “has”, “with”, or variants thereof as used herein mean “comprising”.

[0061] Unless otherwise specified, the words “comprising”, “comprise”, “comprises”, “having”, “have”, “has”, “including”, “includes”, “include”, “containing”, “contains” and “contain” are inclusive or open-ended and do not exclude additional, unrecited elements or method steps.

[0062] Reference to “some embodiments”, “an embodiment”, “one embodiment”, or “other embodiments” means that a particular feature or characteristic described in connection with the embodiments is included in at least one or more embodiments, but not necessarily all embodiments, of the present disclosure.

[0063] The term “about” or “approximately” means within an acceptable error range for the particular value as determined by one of ordinary skill in the art, which will depend in part on how the value is measured or determined, i.e., the limitations of the measurement system. For example, “about” can mean within 1 standard deviation, per the practice in the art. Alternatively, “about” can mean a range of up to 20%, up to 10%, up to 5%, or up to 1% of a given value. Alternatively, particularly with respect to biological systems or processes, the term can mean within an order of magnitude, preferably within 5-fold, and more preferably within 2-fold, of a value. Where particular values are described in the application and claims, unless otherwise stated, the term “about” meaning within an acceptable error range for the particular value should be assumed.

[0064] As used herein, a “cell” can generally refer to a biological cell. A cell can be the basic structural, functional and/or biological unit of a living organism. A cell can originate from any organism having one or more cells. Some non-limiting examples include: a prokaryotic cell, eukaryotic cell, a bacterial cell, an archaeal cell, a cell of a single-cell eukaryotic organism, a protozoa cell, a cell from a plant, an animal cell, a cell from an invertebrate animal (e.g. fruit fly, cnidarian, echinoderm, nematode, etc.), a cell from a vertebrate animal (e.g., fish, amphibian, reptile, bird, mammal), a cell from a mammal (e.g., a pig, a cow, a goat, a sheep, a rodent, a rat, a mouse, a non-human primate, a human, etc.), et cetera. Sometimes a cell may not originate from a natural organism (e.g., a cell can be synthetically made, sometimes termed an artificial cell).

[0065] In some embodiments, the cell is a human cell. A cell may be of or derived from different tissues, organs, and/or cell types. In some embodiments, the cell is a primary cell. In some embodiments, the term primary cell means a cell isolated from an organism, e.g., a mammal, which is grown in tissue culture (i.e., in vitro) for the first time before subdivision and transfer to a subculture. In some non-limiting examples, mammalian primary cells can be modified through introduction of one or more polynucleotides, polypeptides, and/or prime editing compositions (e.g., through transfection, transduction, electroporation and the like) and further passaged. Such modified mammalian primary cells include muscle cells (e.g., cardiac muscle cells, smooth muscle cells, myosatellite cells), epithelial cells (e.g., mammary epithelial cells, intestinal epithelial cells, hepatocytes), endothelial cells, glial cells, neural cells, formed elements of the blood (e.g., lymphocytes, bone marrow cells), precursors of any of these somatic cell types, and stem cells. In some embodiments, the cell is a fibroblast. In some embodiments, the cell is a stem cell. In some embodiments, the cell is a pluripotent stem cell. In some embodiments, the cell is an induced pluripotent stem cell (iPSC). In some embodiments, the cell is a stem cell. In some embodiments, the cell is an embryonic stem cell (ESC). In some embodiments, the cell is a human stem cell. In some embodiments, the cell is a human pluripotent stem cell. In some embodiments, the cell is a human fibroblast. In some embodiments, the cell is an induced human pluripotent stem cell (iPSC). In some embodiments, the cell is a human stem cell. In some embodiments, the cell is a human embryonic stem cell.

[0066] In some embodiments, a cell is not isolated from an organism but forms part of a tissue or organ of an organism, e.g., a mammal. In some non-limiting examples, mammalian cells include muscle cells (e.g., cardiac muscle cells, smooth muscle cells, myosatellite cells), epithelial cells (e.g., mammary epithelial cells, intestinal epithelial cells, hepatocytes), endothelial cells, glial cells, neural cells, formed elements of the blood (e.g., lymphocytes, bone marrow cells), precursors of any of these somatic cell types, and stem cells. In some embodiments, the cell is a primary muscle cell. In some embodiments, the cell is a myosatellite cell (a satellite cell). In some embodiments, the cell is a human myosatellite cell (a satellite cell). In some embodiments, the cell is a stem cell. In some embodiments, the cell is a human stem cell.

[0067] In some embodiments, the cell is a differentiated cell. In some embodiments, cell is a fibroblast. In some embodiments, the cell is a differentiated muscle cell, a myosatellite cell, a differentiated epithelial cell, or a differentiated neuron cell. In some embodiments, the cell is a skeletal muscle cell. In some embodiments, the skeletal muscle cell is differentiated from an iPSC, ESC or myosatellite cell. In some embodiments, the cell is a differentiated human cell. In some embodiments, cell is a human fibroblast. In some embodiments, the cell is a differentiated human muscle cell. In some embodiments, cell is a human myosatellite cell. In some embodiments, the cell is a human skeletal muscle cell. In some embodiments, the human skeletal muscle cell is differentiated from a human iPSC, human ESC or human myosatellite cell. In some embodiments, the cell is differentiated from a human iPSC or human ESC.

[0068] In some embodiments, the cell comprises a prime editor (e.g., a split prime editor), a PEgRNA, a ngRNA, a prime editing system, or a prime editing complex. In some embodiments, the cell is from a human subject. In some embodiments, the human subject has a disease or condition associated with a mutation to be corrected by prime editing. In some embodiments, the cell is from a human subject, and comprises a prime editor (e.g., a split prime editor), a PERNA, a ngRNA, a prime editing system, or a prime editing complex for correction of the mutation. In some embodiments, the cell is from the human subject and the mutation has been edited or corrected by prime editing. In some embodiments, the cell is in a human subject, and comprises a prime editor (e.g., a split prime editor), a PEgRNA, a ngRNA, a prime editing system, or a prime editing complex for correction of the mutation. In some embodiments, the cell is from the human subject and the mutation has been edited or corrected by prime editing.

[0069] As used herein, “intein” refers an auto-catalytic protein segments capable of excising itself from a larger precursor protein, enabling the flanking extein (external protein) sequences to be ligated through the formation of a new peptide bond (e.g., protein splicing). Inteins may include a protein domain sequence that can spontaneously splice (e.g., splice from protein flanking N- and C-terminal domains) and excise itself from a sequence to become a mature protein.

[0070] As used herein, “leucine zipper” refers to an amphipathic a helix containing heptad repeats of Leu residues on one face of the helix and serves as a dimerization module. On dimerization, the leucine-zipper a helices form a parallel-coiled coil based on hydrophobic interfacial side-chain packing. The dimerization brings a molecular surface (e.g., a DNA-binding surface) to the positions appropriate for contacting the surface in a scissor-grip mode or in an induced helical fork mode. A leucine zipper motif is commonly motif found in many DNA-binding proteins, including transcription factors such as C/EBP, Jun, Fos, GCN4, and HSF.

[0071] As used herein, “passively assemble” or “passive assembly” refers to a process in which an organized structure forms from individual components, as a result of specific, local interactions among the individual components, without the aid of external components (e.g., two or more split prime editor fragments or sequences associate inside a cell to reconstitute a split prime editor without aid of additional peptides).

[0072] The term “substantially” as used herein may refer to a value approaching 100% of a given value. In some embodiments, the term may refer to an amount that may be at least about 70%, 80%, 90%, 91%, 92%, 93%, 94%, 95%, 96%, 97%, 98%, 99%, 99.9%, or 99.99% of a total amount. In some embodiments, the term may refer to an amount that may be about 100% of a total amount.

[0073] The terms “protein” and “polypeptide” can be used interchangeably to refer to a polymer of two or more amino acids joined by covalent bonds (e.g., an amide bond) that can adopt a three-dimensional conformation. In some embodiments, a protein or polypeptide comprises at least 10 amino acids, 15 amino acids, 20 amino acids, 30 amino acids or 50 amino acids joined by covalent bonds (e.g., amide bonds). In some embodiments, a protein comprises at least two amide bonds. In some embodiments, a protein comprises multiple amide bonds. In some embodiments, a protein comprises an enzyme, enzyme precursor proteins, regulatory protein, structural protein, receptor, nucleic acid binding protein, a biomarker, a member of a specific binding pair (e.g., a ligand or aptamer), or an antibody. In some embodiments, a protein may be a full-length protein (e.g., a fully processed protein having certain biological function). In some embodiments, a protein may be a variant or a fragment of a full-length protein. For example, in some embodiments, a Cas9 protein domain comprises an H840A amino acid substitution compared to a naturally occurring S. pyogenes Cas9 protein. A variant of a protein or enzyme, for example a variant reverse transcriptase, comprises a polypeptide having an amino acid sequence that is about 60% identical, about 70% identical, about 80% identical, about 90% identical, about 95% identical, about 96% identical, about 97% identical, about 98% identical, about 99% identical, about 99.5% identical, or about 99.9% identical to the amino acid sequence of a reference protein.

[0074] In some embodiments, a protein comprises one or more protein domains or subdomains. As used herein, the term “polypeptide domain”, “protein domain”, or “domain” when used in the context of a protein or polypeptide, refers to a polypeptide chain that has one or more biological functions, e.g., a catalytic function, a protein-protein binding function, or a protein-DNA function. In some embodiments, a protein comprises multiple protein domains. In some embodiments, a protein comprises multiple protein domains that are naturally occurring. In some embodiments, a protein comprises multiple protein domains from different naturally occurring proteins. For example, in some embodiments, a split prime editor may be a protein comprising a Cas9 protein domain of S. pyogenes and a reverse transcriptase protein domain of Moloney murine leukemia virus. A protein that comprises amino acid sequences from different origins or naturally occurring proteins may be referred to as a fusion, or chimeric protein.

[0075] In some embodiments, a protein comprises a functional variant or functional fragment of a full-length wild type protein. A “functional fragment” or “functional portion”, as used herein, refers to any portion of a reference protein (e.g., a wild type protein) that encompasses less than the entire amino acid sequence of the reference protein while retaining one or more of the functions, e.g., catalytic or binding functions. For example, a functional fragment of a reverse transcriptase may encompass less than the entire amino acid sequence of a wild type reverse transcriptase, but retains the ability under at least one set of conditions to catalyze the polymerization of a polynucleotide. When the reference protein is a fusion of multiple functional domains, a functional fragment thereof may retain one or more of the functions of at least one of the functional domains. For example, a functional fragment of a Cas9 may encompass less than the entire amino acid sequence of a wild type Cas9, but retains its DNA binding ability and lacks its nuclease activity partially or completely.

[0076] A “functional variant” or “functional mutant”, as used herein, refers to any variant or mutant of a reference protein (e.g., a wild type protein) that encompasses one or more alterations to the amino acid sequence of the reference protein while retaining one or more of the functions, e.g., catalytic or binding functions. In some embodiments, the one or more alterations to the amino acid sequence comprises amino acid substitutions, insertions or deletions, or any combination thereof. In some embodiments, the one or more alterations to the amino acid sequence comprises amino acid substitutions. For example, a functional variant of a reverse transcriptase may comprise one or more amino acid substitutions compared to the amino acid sequence of a wild type reverse transcriptase, but retains the ability under at least one set of conditions to catalyze the polymerization of a polynucleotide. When the reference protein is a fusion of multiple functional domains, a functional variant thereof may retain one or more of the functions of at least one of the functional domains. For example, in some embodiments, a functional fragment of a Cas9 may comprise one or more amino acid substitutions in a nuclease domain, e.g., an H840A amino acid substitution, compared to the amino acid sequence of a wild type Cas9, but retains the DNA binding ability and lacks the nuclease activity partially or completely.

[0077] The term “function” and its grammatical equivalents as used herein may refer to a capability of operating, having, or serving an intended purpose. Functional may comprise any percent from baseline to 100% of an intended purpose. For example, functional may comprise or comprise about 5%, 10%, 15%, 20%, 25%, 30%, 35%, 40%, 45%, 50%, 55%, 60%, 65%, 70%, 75%, 80%, 85%, 90%, 95%, or up to about 100% of an intended purpose. In some embodiments, the term functional may mean over or over about 100% of normal function, for example, 125%, 150%, 175%, 200%, 250%, 300%, 400%, 500%, 600%, 700% or up to about 1000% of an intended purpose. In some embodiments, a protein or polypeptides includes naturally occurring amino acids (e.g., one of the twenty amino acids commonly found in peptides synthesized in nature, and known by the one letter abbreviations A, R, N, C, D, Q, E, G, H, I, L, K, M, F, P, S, T, W, Y and V). In some embodiments, a protein or polypeptides includes non-naturally occurring amino acids (e.g., amino acids which is not one of the twenty amino acids commonly found in peptides synthesized in nature, including synthetic amino acids, amino acid analogs, and amino acid mimetics). In some embodiments, a protein or polypeptide is modified.

[0078] In some embodiments, a protein comprises an isolated polypeptide. The term “isolated” means free or removed to varying degrees from components which normally accompany it as found in the natural state or environment. For example, a polypeptide naturally present in a living animal is not isolated, and the same polypeptide partially or completely separated from the coexisting materials of its natural state is isolated.

[0079] In some embodiments, a protein is present within a cell, a tissue, an organ, or a virus particle. In some embodiments, a protein is present within a cell or a part of a cell (e.g., a bacteria cell, a plant cell, or an animal cell). In some embodiments, the cell is in a tissue, in a subject, or in a cell culture. In some embodiments, the cell is a microorganism (e.g., a bacterium, fungus, protozoan, or virus). In some embodiments, a protein is present in a mixture of analytes (e.g., a lysate). In some embodiments, the protein is present in a lysate from a plurality of cells or from a lysate of a single cell.

[0080] The terms “homologous,” “homology,” or “percent homology” as used herein refer to the degree of sequence identity between an amino acid or polynucleotide sequence and a corresponding reference sequence. “Homology” can refer to polymeric sequences, e.g., polypeptide or DNA sequences that are similar. Homology can mean, for example, nucleic acid sequences with at least about: 50%, 55%, 60%, 65%, 70%, 75%, 80%, 81%, 82%, 83%, 84%, 85%, 86%, 87%, 88%, 89%, 90%, 91%, 92%, 93%, 94%, 95%, 96%, 97%, 98%, 99%, or 100% identity. In other embodiments, a “homologous sequence” of nucleic acid sequences may exhibit 93%, 95% or 98% sequence identity to the reference nucleic acid sequence. For example, a “region of homology to a genomic region” can be a region of DNA that has a similar sequence to a given genomic region in the genome. A region of homology can be of any length that is sufficient to promote binding of a spacer, primer binding site or protospacer sequence to the genomic region. For example, the region of homology can comprise at least 5, 10, 11, 12, 13, 14, 15, 16, 17, 18, 19, 20, 21, 22, 23, 24, 25, 30, 35, 40, 45, 50, 55, 60, 65, 70, 75, 80, 85, 90, 95, 100, 200, 300, 400, 500, 600, 700, 800, 900, 1000, 1100, 1200, 1300, 1400, 1500, 1600, 1700, 1800, 1900, 2000, 2100, 2200, 2300, 2400, 2500, 2600, 2700, 2800, 2900, 3000, 3100 or more bases in length such that the region of homology has sufficient homology to undergo binding with the corresponding genomic region.

[0081] When a percentage of sequence homology or identity is specified, in the context of two nucleic acid sequences or two polypeptide sequences, the percentage of homology or identity generally refers to the alignment of two or more sequences across a portion of their length when compared and aligned for maximum correspondence. When a position in the compared sequence can be occupied by the same base or amino acid, then the molecules can be homologous at that position. Unless stated otherwise, sequence homology or identity is assessed over the specified length of the nucleic acid, polypeptide or portion thereof. In some embodiments, the homology or identity is assessed over a functional portion or specified portion of the length.

[0082] Alignment of sequences for assessment of sequence homology can be conducted by algorithms known in the art, such as the Basic Local Alignment Search Tool (BLAST) algorithm, which is described in Altschul et al, J. Mol. Biol. 215:403-410, 1990. A publicly available, internet interface, for performing BLAST analyses is accessible through the National Center for Biotechnology Information. Additional known algorithms include those published in: Smith & Waterman, “Comparison of Biosequences”, Adv. Appl. Math. 2:482, 1981; Needleman & Wunsch, “A general method applicable to the search for similarities in the amino acid sequence of two proteins” J. Mol. Biol. 48:443, 1970; Pearson & Lipman “Improved tools for biological sequence comparison”, Proc. Natl. Acad. Sci. USA 85:2444, 1988; or by automated implementation of these or similar algorithms. Global alignment programs may also be used to align similar sequences of roughly equal size. Examples of global alignment programs include NEEDLE (available at www.ebi.ac.uk/Tools/psa/emboss_needle/) which is part of the EMBOSS package (Rice P et al., Trends Genet., 2000; 16:276-277), and the GGSEARCH program https://fasta.bioch.virginia.edu/fasta_www2/, which is part of the FASTA package (Pearson W and Lipman D, 1988, Proc. Natl. Acad. Sci. USA, 85:2444-2448). Both of these programs are based on the Needleman-Wunsch algorithm which is used to find the optimum alignment (including gaps) of two sequences along their entire length. A detailed discussion of sequence analysis can also be found in Unit 19.3 of Ausubel et al (“Current Protocols in Molecular Biology” John Wiley & Sons Inc, 1994-1998, Chapter 15, 1998).

[0083] A skilled person understands that amino acid (or nucleotide) positions may be determined in homologous sequences based on alignment, for example, “H840” in a reference Cas9 sequence may correspond to H839, or another position in a Cas9 homolog.

[0084] The term “polynucleotide” or “nucleic acid molecule” can be any polymeric form of nucleotides, including DNA, RNA, a hybridization thereof, or RNA-DNA chimeric molecules. In some embodiments, a polynucleotide comprises cDNA, genomic DNA, mRNA, tRNA, rRNA, or microRNA. In some embodiments, a polynucleotide is double stranded, e.g., a double-stranded DNA in a gene. In some embodiments, a polynucleotide is single-stranded or substantially single-stranded, e.g., single-stranded DNA or an mRNA. In some embodiments, a polynucleotide is a cell-free nucleic acid molecule. In some embodiments, a polynucleotide circulates in blood. In some embodiments, a polynucleotide is a cellular nucleic acid molecule. In some embodiments, a polynucleotide is a cellular nucleic acid molecule in a cell circulating in blood.

[0085] Polynucleotides can have any three-dimensional structure. The following are nonlimiting examples of polynucleotides: a gene or gene fragment (for example, a probe, primer, EST or SAGE tag), an exon, an intron, intergenic DNA (including, without limitation, heterochromatic DNA), messenger RNA (mRNA), transfer RNA (tRNA), ribosomal RNA (rRNA), a ribozyme, cDNA, a recombinant polynucleotide, a branched polynucleotide, a plasmid, a vector, isolated DNA, isolated RNA, sgRNA, guide RNA, a nucleic acid probe, a primer, an snRNA, a long non-coding RNA, a snoRNA, a siRNA, a miRNA, a tRNA-derived small RNA (tsRNA), an antisense RNA, an shRNA, or a small rDNA-derived RNA (srRNA).

[0086] In some embodiments, a polynucleotide comprises deoxyribonucleotides, ribonucleotides or analogs thereof. In some embodiments, a polynucleotide comprises modified nucleotides, such as methylated nucleotides and nucleotide analogs. If present, modifications to the nucleotide structure can be imparted before or after assembly of the polynucleotide. The sequence of nucleotides can be interrupted by non-nucleotide components. A polynucleotide can be further modified after polymerization, such as by conjugation with a labeling component.

[0087] In some embodiments, a polynucleotide is composed of a specific sequence of four nucleotide bases: adenine (A); cytosine (C); guanine (G); thymine (T); and uracil (U) for thymine when the polynucleotide is RNA. In some embodiments, the polynucleotide may comprise one or more other nucleotide bases, such as inosine (I), which is read by the translation machinery as guanine (G).

[0088] In some embodiments, a polynucleotide may be modified. As used herein, the terms “modified” or “modification” refers to chemical modification with respect to the A, C, G, T and U nucleotides. In some embodiments, modifications may be on the nucleoside base and/or sugar portion of the nucleosides that comprise the polynucleotide. In some embodiments, the modification may be on the internucleoside linkage (e.g., phosphate backbone). In some embodiments, multiple modifications are included in the modified nucleic acid molecule. In some embodiments, a single modification is included in the modified nucleic acid molecule.

[0089] The term “complement”, “complementary”, or “complementarity” as used herein, refers to the ability of two polynucleotide molecules to base pair with each other. Complementary polynucleotides may base pair via hydrogen bonding, which may be Watson Crick, Hoogsteen or reversed Hoogsteen hydrogen bonding. For example, an adenine on one polynucleotide molecule will base pair to a thymine or uracil on a second polynucleotide molecule and a cytosine on one polynucleotide molecule will base pair to a guanine on a second polynucleotide molecule. Two polynucleotide molecules are complementary to each other when a first polynucleotide molecule comprising a first nucleotide sequence can base pair with a second polynucleotide molecule comprising a second nucleotide sequence. For instance, the two DNA molecules 5′-ATGC-3′ and 5′-GCAT-3′ are complementary, and the complement of the DNA molecule 5′-ATGC-3′ is 5′-GCAT-3′. A percentage of complementarity indicates the percentage of nucleotides in a polynucleotide molecule which can base pair with a second polynucleotide molecule (e.g., 5, 6, 7, 8, 9, 10 out of 10 being 50%, 60%, 70%, 80%, 90%, and 100% complementary, respectively). “Perfectly complementary” means that all the contiguous nucleotides of a polynucleotide molecule will base pair with the same number of contiguous nucleotides in a second polynucleotide molecule. “Substantially complementary” as used herein refers to a degree of complementarity that can be 70%, 75%, 80%, 85%, 90%, 95%, 97%, 98%, or 99% over all or a portion of two polynucleotide molecules. In some embodiments, the portion of complementarity may be a region of 10, 15, 20, 25, 30, 35, 40, 45, 50, or more nucleotides. “Substantial complementary” can also refer to a 100% complementarity over a portion of two polynucleotide molecules. In some embodiments, the portion of complementarity between the two polynucleotide molecules is at least 60%, 65%, 70%, 75%, 80%, 85%, 90%, 95%, 97%, 98%, or 99% of the length of at least one of the two polynucleotide molecules or a functional or defined portion thereof.

[0090] As used herein, “expression” refers to the process by which polynucleotides are transcribed into mRNA and/or the process by which polynucleotides, e.g., the transcribed mRNA, translated into peptides, polypeptides, or proteins. If the polynucleotide is derived from genomic DNA, expression may include splicing of the mRNA in a eukaryotic cell. In some embodiments, expression of a polynucleotide, e.g., a gene or a DNA encoding a protein, is determined by the amount of the protein encoded by the gene after transcription and translation of the gene. In some embodiments, expression of a polynucleotide, e.g., a gene or a DNA encoding a protein, is determined by the amount of a functional form of the protein encoded by the gene after transcription and translation of the gene. In some embodiments, expression of a gene is determined by the amount of the mRNA, or transcript, that is encoded by the gene after transcription the gene. In some embodiments, expression of a polynucleotide, e.g., an mRNA, is determined by the amount of the protein encoded by the mRNA after translation of the mRNA. In some embodiments, expression of a polynucleotide, e.g., an mRNA or coding RNA, is determined by the amount of a functional form of the protein encoded by the polypeptide after translation of the polynucleotide.

[0091] The term “sequencing” as used herein, may comprise capillary sequencing, bisulfite-free sequencing, bisulfite sequencing, TET-assisted bisulfite (TAB) sequencing, ACE-sequencing, high-throughput sequencing, Maxam-Gilbert sequencing, massively parallel signature sequencing, Polony sequencing, 454 pyrosequencing, Sanger sequencing, Illumina sequencing, SOLID sequencing, Ion Torrent semiconductor sequencing, DNA nanoball sequencing, Heliscope single molecule sequencing, single molecule real time (SMRT) sequencing, nanopore sequencing, shot gun sequencing, RNA sequencing, or any combination thereof.

[0092] The terms “equivalent” or “biological equivalent” are used interchangeably when referring to a particular molecule, or biological or cellular material, and means a molecule having minimal homology to another molecule while still maintaining a desired structure or functionality.

[0093] The term “encode” as it is applied to polynucleotides refers to a polynucleotide which is said to “encode” another polynucleotide, a polypeptide, or an amino acid if, in its native state or when manipulated by methods well known to those skilled in the art, it can be used as polynucleotide synthesis template, e.g., transcribed into an RNA, reverse transcribed into a DNA or cDNA, and/or translated to produce an amino acid, or a polypeptide or fragment thereof. In some embodiments, a polynucleotide comprising three contiguous nucleotides form a codon that encodes a specific amino acid. In some embodiments, a polynucleotide comprises one or more codons that encode a polypeptide. In some embodiments, a polynucleotide comprising one or more codons comprises a mutation in a codon compared to a wild-type reference polynucleotide. In some embodiments, the mutation in the codon encodes an amino acid substitution in a polypeptide encoded by the polynucleotide as compared to a wild-type reference polypeptide.

[0094] The term “mutation” as used herein refers to a change and/or alteration in an amino acid sequence of a protein or nucleic acid sequence of a polynucleotide. Such changes and/or alterations may comprise the substitution, insertion, deletion and/or truncation of one or more amino acids, in the case of an amino acid sequence, and/or nucleotides, in the case of nucleic acid sequence, compared to a reference amino acid or nucleic acid sequence. In some embodiments, the reference sequence is a wild-type sequence. In some embodiments, a mutation in a nucleic acid sequence of a polynucleotide encodes a mutation in the amino acid sequence of a polypeptide. In some embodiments, the mutation in the amino acid sequence of the polypeptide or the mutation in the nucleic acid sequence of the polynucleotide is a mutation associated with a disease state.

[0095] The term “subject” and its grammatical equivalents as used herein may refer to a human or a non-human. A subject may be a mammal. A human subject may be male or female. A human subject may be of any age. A subject may be a human embryo. A human subject may be a newborn, an infant, a child, an adolescent, or an adult. A human subject may be up to about 100 years of age. A human subject may be in need of treatment for a genetic disease or disorder.

[0096] The terms “treatment” or “treating” and their grammatical equivalents may refer to the medical management of a subject with an intent to cure, ameliorate, or ameliorate a symptom of, a disease, condition, or disorder. Treatment may include active treatment, that is, treatment directed specifically toward the improvement of a disease, condition, or disorder. Treatment may include causal treatment, that is, treatment directed toward removal of the cause of the associated disease, condition, or disorder. In addition, this treatment may include palliative treatment, that is, treatment designed for the relief of symptoms rather than the curing of the disease, condition, or disorder. Treatment may include supportive treatment, that is, treatment employed to supplement another specific therapy directed toward the improvement of the disease, condition, or disorder. In some embodiments, a condition may be pathological. In some embodiments, a treatment may not completely cure or prevent a disease, condition, or disorder. In some embodiments, a treatment ameliorates, but does not completely cure or prevent a disease, condition, or disorder. In some embodiments, a subject may be treated for 12 hours, 24 hours, 2 days, 3 days, 4 days, 5 days, 6 days, 7 days, 2 weeks, 3 weeks, 4 weeks, 2 months, 3 months, 4 months, 5 months, 6 months, 1 year, 2 years, 3 years, 4 years, 5 years, 6 years, indefinitely, or life of the subject.

[0097] The term “ameliorate” and its grammatical equivalents means to decrease, suppress, attenuate, diminish, arrest, or stabilize the development or progression of a disease.

[0098] The term “antibody” as used to herein includes whole antibodies and any antigen binding fragments (i.e., “antigen-binding portions”) or single chains thereof. An “antibody” refers, in one embodiment, to a glycoprotein comprising at least two heavy (H) chains and two light (L) chains inter-connected by disulfide bonds, or an antigen binding portion thereof. Each heavy chain is comprised of a heavy chain variable region (abbreviated herein as V_{H}) and a heavy chain constant region. In certain naturally occurring antibodies, the heavy chain constant region is comprised of three domains, CH1, CH2 and CH3. In certain naturally occurring antibodies, each light chain is comprised of a light chain variable region (abbreviated herein as V_{L}) and a light chain constant region. The light chain constant region is comprised of one domain, CL. The V_{H} and V_{L} regions can be further subdivided into regions of hypervariability, termed complementarity determining regions (CDR), interspersed with regions that are more conserved, termed framework regions (FR). Each V_{H} and V_{L} is composed of three CDRs and four FRs, arranged from amino-terminus to carboxy-terminus in the following order: FR1, CDR1, FR2, CDR2, FR3, CDR3, FR4. The variable regions of the heavy and light chains contain a binding domain that interacts with an antigen. The constant regions of the antibodies may mediate the binding of the immunoglobulin to host tissues or factors, including various cells of the immune system (e.g., effector cells) and the first component (C1q) of the classical complement system.

[0099] Antibodies typically bind specifically to their cognate antigen with high affinity, reflected by a dissociation constant (K_{D}) of 10⁻⁵ to 10⁻¹¹ M or less. Any K_{D} greater than about 10⁻⁴ M is generally considered to indicate nonspecific binding. As used herein, an antibody that “binds specifically” to an antigen refers to an antibody that binds to the antigen and substantially identical antigens with high affinity, which means having a K_{D} of 10⁻⁷ M or less, preferably 10⁻⁸ M or less, even more preferably 5×10⁻⁹ M or less, and most preferably between 10⁻⁸ M and 10⁻¹⁰ M or less, but does not bind with high affinity to unrelated antigens. An antigen is “substantially identical” to a given antigen if it exhibits a high degree of sequence identity to the given antigen, for example, if it exhibits at least 80%, at least 90%, preferably at least 95%, more preferably at least 97%, or even more preferably at least 99% sequence identity to the sequence of the given antigen.

[0100] In some embodiments, the antibody may be a single domain antibody (e.g., a NANOBODY®). In some embodiments, the single domain antibody is a recombinant variable domain of a heavy-chain-only antibody. For example, a single domain antibody can include a VHH, a humanized VHH or a camelized VH (such as a camelized human VH) or generally a sequence optimized VHH (such as e.g., optimized for chemical stability and/or solubility, maximum overlap with known human framework regions and maximum expression).

[0101] The terms “prevent” or “preventing” means delaying, forestalling, or avoiding the onset or development of a disease, condition, or disorder for a period of time. Prevent also means reducing risk of developing a disease, disorder, or condition. Prevention includes minimizing or partially or completely inhibiting the development of a disease, condition, or disorder. In some embodiments, a composition, e.g., a pharmaceutical composition, prevents a disorder by delaying the onset of the disorder for 12 hours, 24 hours, 2 days, 3 days, 4 days, 5 days, 6 days, 7 days, 2 weeks, 3 weeks, 4 weeks, 2 months, 3 months, 4 months, 5 months, 6 months, 1 year, 2 years, 3 years, 4 years, 5 years, 6 years, indefinitely, or life of a subject.

[0102] The term “effective amount” or “therapeutically effective amount” may refer to a quantity of a composition, for example a composition comprising a construct, that can be sufficient to result in a desired activity upon introduction into a subject as disclosed herein. An effective amount of the prime editing compositions can be provided to the target gene or cell, whether the cell is ex vivo or in vivo.

[0103] An effective amount can be the amount to induce, for example, at least about a 2-fold change (increase or decrease) or more in the amount of target nucleic acid modulation (e.g., expression of a gene to produce functional a protein) observed relative to a negative control. An effective amount or dose can induce, for example, about 2-fold increase, about 3-fold increase, about 4-fold increase, about 5-fold increase, about 6-fold increase, about 7-fold increase, about 8-fold increase, about 9-fold increase, about 10-fold increase, about 25-fold increase, about 50-fold increase, about 100-fold increase, about 200-fold increase, about 500-fold increase, about 700-fold increase, about 1000-fold increase, about 5000-fold increase, or about 10,000-fold increase in target gene modulation (e.g., expression of a target gene to produce a functional protein).

[0104] The amount of target gene modulation may be measured by any suitable method known in the art. In some embodiments, the “effective amount” or “therapeutically effective amount” is the amount of a composition that is required to ameliorate the symptoms of a disease relative to an untreated patient. In some embodiments, an effective amount is the amount of a composition sufficient to introduce an alteration in a gene of interest in a cell (e.g., a cell in vitro or in vivo).

### Prime Editing

[0105] The term “prime editing” refers to programmable editing of a target DNA using a prime editor complexed with a PEgRNA to incorporate an intended nucleotide sequence modification into the target DNA through target-primed DNA synthesis. A target polynucleotide (e.g., a target gene) of prime editing may comprise a double stranded DNA molecule having two complementary strands: a first strand that may be referred to as a “target strand” or a “non-edit strand”, and a second strand that may be referred to as a “non-target strand,” or an “edit strand.” In some embodiments, in a prime editing guide RNA (PEgRNA), a spacer sequence is complementary or substantially complementary to a specific sequence on the target strand, which may be referred to as a “search target sequence”. In some embodiments, the spacer sequence anneals with the target strand at the search target sequence. The target strand may also be referred to as the “non-Protospacer Adjacent Motif (non-PAM strand).” In some embodiments, the non-target strand may also be referred to as the “PAM strand”. In some embodiments, the PAM strand comprises a protospacer sequence and optionally a protospacer adjacent motif (PAM) sequence. In prime editing using a Cas-protein-based split prime editor, a PAM sequence refers to a short DNA sequence immediately adjacent to the protospacer sequence on the PAM strand of the target gene. A PAM sequence may be specifically recognized by a programmable DNA binding protein, e.g., a Cas nickase or a Cas nuclease. In some embodiments, a specific PAM is characteristic of a specific programmable DNA binding protein, e.g., a Cas nickase or a Cas nuclease. A protospacer sequence refers to a specific sequence in the PAM strand of the target gene that is complementary to the search target sequence. In a PEgRNA, a spacer sequence may have a substantially identical sequence as the protospacer sequence on the edit strand of a target gene, except that the spacer sequence may comprise Uracil (U) and the protospacer sequence may comprise Thymine (T).

[0106] In some embodiments, the double stranded target DNA comprises a nick site on the PAM strand (or non-target strand). As used herein, a “nick site” refers to a specific position in between two nucleotides or two base pairs of the double stranded target DNA. In some embodiments, the position of a nick site is determined relative to the position of a specific PAM sequence. In some embodiments, the nick site is the particular position where a nick will occur when the double stranded target DNA is contacted with a nickase, for example, a Cas nickase, that recognizes a specific PAM sequence. In some embodiments, the nick site is upstream of a specific PAM sequence on the PAM strand of the double stranded target DNA. In some embodiments, the nick site is downstream of a specific PAM sequence on the PAM strand of the double stranded target DNA. In some embodiments, the nick site is 3 base pairs upstream of the PAM sequence, and the PAM sequence is recognized by a Streptococcus pyogenes Cas9 nickase, a P. lavamentivorans Cas9 nickase, a C. diphtheriae Cas9 nickase, a N. cinerea Cas9, a S. aureus Cas9, or a N. lari Cas9 nickase. In some embodiments, the nick site is 3 base pairs upstream of the PAM sequence, and the PAM sequence is recognized by a Cas9 nickase, wherein the Cas9 nickase comprises a nuclease active HNH domain and a nuclease inactive RuvC domain. In some embodiments, the nick site is 2 base pairs upstream of the PAM sequence, and the PAM sequence is recognized by a S. thermophilus Cas9 nickase.

[0107] In some embodiments, a PEgRNA complexes with and directs a split prime editor to bind to the search target sequence of the target gene. In some embodiments, the bound split prime editor generates a nick on the edit strand (PAM strand) of the target gene at the nick site. In some embodiments, a primer binding site (PBS) of the PEgRNA anneals with a free 3′ end formed at the nick site, and the split prime editor initiates DNA synthesis from the nick site, using the free 3′ end as a primer. Subsequently, a single-stranded DNA encoded by the editing template of the PEgRNA is synthesized. In some embodiments, the newly synthesized single-stranded DNA comprises one or more intended nucleotide edits compared to the endogenous target gene sequence. In some embodiments, the editing template of a PEgRNA is complementary to a sequence in the edit strand except for one or more mismatches at the intended nucleotide edit positions in the editing template partially complementary to the editing template may be referred to as an “editing target sequence”. Accordingly, in some embodiments, the newly synthesized single stranded DNA has identity or substantial identity to a sequence in the editing target sequence, except for one or more insertions, deletions, or substitutions at the intended nucleotide edit positions.

[0108] In some embodiments, the newly synthesized single-stranded DNA equilibrates with the editing target on the edit strand of the target gene for pairing with the target strand of the target gene. In some embodiments, the editing target sequence of the target gene is excised by a flap endonuclease (FEN), for example, FEN1. In some embodiments, the FEN is an endogenous FEN, for example, in a cell comprising the target gene. In some embodiments, the FEN is provided as part of the split prime editor, either linked to other components of the split prime editor or provided in trans. In some embodiments, the newly synthesized single stranded DNA, which comprises the intended nucleotide edit, replaces the endogenous single stranded editing target sequence on the edit strand of the target gene. In some embodiments, the newly synthesized single stranded DNA and the endogenous DNA on the target strand form a heteroduplex DNA structure at the region corresponding to the editing target sequence of the target gene. In some embodiments, the newly synthesized single-stranded DNA comprising the nucleotide edit is paired in the heteroduplex with the target strand of the target DNA that does not comprise the nucleotide edit, thereby creating a mismatch between the two otherwise complementary strands. In some embodiments, the mismatch is recognized by DNA repair machinery, e.g., an endogenous DNA repair machinery. In some embodiments, through DNA repair, the intended nucleotide edit is incorporated into the target gene.

### Split Prime Editors

[0109] The term “split prime editor (PE)” refers to a prime editor composed of at least two polypeptides (e.g., a first polypeptide and a second polypeptide) that individually are not capable of functioning as a prime editor but that are able to associate under physiological conditions to facilitate prime editing. Advantageously, the individual polypeptides of the split prime editor (or nucleic acids encoding the individual polypeptides of the split prime editor) can be separately delivered to a cell where they associate to form a split prime editor and mediate prime editing. Split prime editors can therefore, for example, be delivered to cells using delivery systems having a smaller payload capacity than a corresponding intact prime editor. As used herein, a split prime editor includes, but is not limited to, protein constructs wherein the first polypeptide and the second polypeptide are joined by a self-cleaving peptide. Therefore, the split prime editor includes embodiments where the split prime editor is a single polypeptide configured to produce at least two polypeptides prior to prime editing.

[0110] In some embodiments, the split prime editor comprises a DNA binding domain and a DNA polymerase domain, wherein the split prime editor comprises a first polypeptide comprising a first amino acid sequence and a second polypeptide comprising a second amino acid sequence.

[0111] In certain embodiments, the first amino acid sequence forms at least a portion of the DNA binding domain, and the second amino acid sequence forms at least a portion of the DNA polymerase domain. In some embodiments, the first amino acid sequence forms the entirety of the DNA binding domain and the second amino acid sequence forms the entirety of the DNA polymerase domain. In some embodiments, the first amino acid sequence forms the entirety of the DNA binding domain and a portion of the DNA polymerase domain, while the second amino acid sequence forms a portion of the DNA polymerase domain. In some embodiments, the first amino acid sequence forms a portion of the DNA binding domain and the second amino acid sequence form a portion of the DNA binding domain and the entirety of the DNA polymerase domain.

[0112] In certain embodiments, the first amino acid sequence forms at least a portion of the DNA polymerase domain, and the second amino acid sequence forms at least a portion of the DNA binding domain. In some embodiments, the first amino acid sequence forms the entirety of the DNA polymerase domain and the second amino acid sequence forms the entirety of the DNA binding domain. In some embodiments, the second amino acid sequence forms the entirety of the DNA binding domain and a portion of the DNA polymerase domain. In some embodiments, the first amino acid sequence forms the entirety of the DNA polymerase domain and a portion of the DNA binding domain, while the second amino acid sequence forms a portion of the DNA binding domain. In some embodiments, the first amino acid sequence forms a portion of the DNA polymerase domain and the second amino acid sequence form a portion of the DNA polymerase domain and the entirety of the DNA binding domain.

[0113] In various embodiments, a split prime editor includes a polypeptide domain having DNA binding activity and a polypeptide domain having DNA polymerase activity.

[0114] In some embodiments, the split prime editor further comprises a polypeptide domain having nuclease activity. In some embodiments, the polypeptide domain having DNA binding activity comprises a nuclease domain or nuclease activity. In some embodiments, the polypeptide domain having nuclease activity comprises a nickase, or a fully active nuclease. As used herein, the term “nickase” refers to a nuclease capable of cleaving only one strand of a double-stranded DNA target. In some embodiments, the split prime editor comprises a polypeptide domain that is an inactive nuclease. In some embodiments, the polypeptide domain having programmable DNA binding activity comprises a nucleic acid guided DNA binding domain, for example, a CRISPR-Cas protein, for example, a Cas9 nickase, a Cpf1 nickase, or another CRISPR-Cas nuclease. In some embodiments, the polypeptide domain having DNA polymerase activity comprises a template-dependent DNA polymerase, for example, a DNA-dependent DNA polymerase or an RNA-dependent DNA polymerase. In some embodiments, the DNA polymerase is a reverse transcriptase. In some embodiments, the split prime editor comprises additional polypeptides involved in prime editing, for example, a polypeptide domain having 5′ endonuclease activity, e.g., a 5′ endogenous DNA flap endonucleases (e.g., FEN1), for helping to drive the prime editing process towards the edited product formation.

[0115] A split prime editor may be engineered. In some embodiments, the polypeptide components of a split prime editor do not naturally occur in the same organism or cellular environment. In some embodiments, the polypeptide components of a split prime editor may be of different origins or from different organisms. In some embodiments, a split prime editor comprises a DNA binding domain and a DNA polymerase domain that are derived from different species. In some embodiments, a split prime editor comprises a Cas polypeptide and a reverse transcriptase polypeptide that are derived from different species. For example, a split prime editor may comprise a S. pyogenes Cas9 polypeptide and a Moloney murine leukemia virus (M-MLV) reverse transcriptase polypeptide.

[0116] In some embodiments, a split prime editor comprises one or more polypeptide domains provided in trans as separate proteins, which are capable of being associated to each other, for example, through non-peptide linkages or through aptamers or recruitment sequences. A split prime editor may comprise a DNA binding domain and a reverse transcriptase domain associated with each other by an RNA-protein recruitment aptamer, e.g., a MS2 aptamer/adapter protein, which may be linked to a PEgRNA. Prime editor polypeptide components may be encoded by one or more polynucleotides in whole or in part. In some embodiments, a single polynucleotide, construct, or vector encodes the split prime editor. In some embodiments, multiple polynucleotides, constructs, or vectors each encode a polypeptide domain or portion of a domain of a split prime editor, or a portion of a split prime editor. For example, a split prime editor may comprise an N-terminal portion fused to an intein-N and a C-terminal portion fused to an intein-C, each of which is individually encoded by an AAV vector.

[0117] A split prime editor may comprise two polypeptides that are capable of associating with each other via the interactions of a single-domain antibody fused to one of the polypeptides and a peptide tag or antigen fused to the second polypeptide. In some embodiments, the two polypeptides are fused via a self-cleaving peptide. In other embodiments, the two polypeptide domains are provided in trans. In some embodiments, a first polypeptide comprises a DNA binding domain fused to a single-domain antibody and the second polypeptide comprises a DNA polymerase domain fused to a peptide tag. In other embodiments, the first polypeptide comprises a DNA binding domain fused to a peptide tag and the second polypeptide comprises a DNA polymerase domain fused to a single-domain antibody. In any embodiment, the first and second polypeptide can further comprise one or more nuclear localization sequences (NLSs). For example, the first polypeptide can comprise an NLS located N-terminally to the DNA biding domain, an NLS located C-terminally to the DNA binding domain, or both; and the second polypeptide can comprise an NLS located N-terminally to the DNA polymerase domain, an NLS located C-terminally to the DNA polymerase domain, or both. Peptide linkers can optionally be included between any of the individual components of a polypeptide.

[0118] Suitable DNA binding domains include, but are not limited to, any Cas protein or variant (e.g., a type II or type IV Cas protein). Exemplary Cas proteins and variants can be found in Tables 1 and 2. The Cas protein can be any Cas protein comprising a RuvC domain, an HNH domain, or both. The Cas protein can be a nickase or a nuclease active Cas protein. Suitable sequences DNA binding domain include, but are not limited to, any sequence found in Table 14; or any sequence having at least 80%, 85%, 90%, 95%, 96%, 97%, 98%, or 99% identity with a sequence found in Table 14.

[0119] Suitable DNA polymerase domains include, but are not limited to, reverse transcriptase domains. Such DNA polymerase domains include, but are not limited to, any sequence found in Table 11, Table 12, or Table 13; or any sequence having at least 80%, 85%, 90%, 95%, 96%, 97%, 98%, or 99% identity with a sequence found in Table 11, Table 12, or Table 13.

[0120] Suitable peptide tag sequences include, but are not limited to, sequences found in Table 16, including sequences that have one or two substitutions compared to a sequence in Table 16. Suitable single domain antibody sequences include, but are not limited to, sequences found in Table 17, including sequences having at least 80%, 85%, 90%, 95%, 96%, 97%, 98%, or 99% identity to a sequence in Table 17. Any of the peptide tag sequences in Table 16 can be paired with a single-domain antibody sequence of Table 17 in a split prime editor system.

[0121] Suitable NLS sequences include, but are not limited to, any sequence found in Table 3, or a sequence having one or two substitutions compared to a sequence found in Table 3.

[0122] Suitable linker peptide sequences include, but are not limited to, any sequence found in Table 15, or a sequence having at least 80%, 85%, 90%, 95%, 96%, 97%, 98%, or 99% identity to a sequence in Table 15.

[0123] Suitable self-cleaving peptide sequences include, but are not limited to, any sequence found in Table 19, or a sequence having at least 80%, 85%, 90%, 95%, 96%, 97%, 98%, or 99% identity to a sequence in Table 19.

[0124] In some embodiments, the split prime editor comprises two peptides not joined by a self-cleaving peptide. In certain embodiments, the prime editor comprises an amino acid sequence as set forth in Table 20 and/or Table 21.

[0125] In some embodiments, the first polypeptide comprises, from N-terminus to C-terminus, a DNA binding domain, a first peptide linker, a peptide tag, a second peptide linker, and a nuclear localization sequence (NLS). In some embodiments, the first polypeptide may further comprise a second NLS located N-terminally of the DNA binding domain. In such embodiments, the second NLS may be attached to the DNA binding domain via a third peptide linker. In some embodiments, the second polypeptide comprises, from N-terminus to C-terminus, an NLS, an optional first peptide linker, a single-domain antibody amino acid sequence, a second peptide linker, and a DNA polymerase domain. In some embodiments, the second polypeptide may further comprise a second NLS located C-terminally of the DNA polymerase domain. In such embodiments, the second NLS may be attached to the DNA polymerase via a third peptide linker. Exemplary first and second polypeptide sequences can be found in Table 20.

[0126] In some embodiments, the first polypeptide comprises, from N-terminus to C-terminus, a DNA binding domain, a first peptide linker, a single-domain antibody amino acid sequence, an optional second peptide linker, and an NLS. In some embodiments, the first polypeptide may further comprise a second NLS located N-terminally of the DNA binding domain. In such embodiments, the second NLS may be attached to the DNA binding domain via a third peptide linker. In some embodiments, the second polypeptide comprises, from N-terminus to C-terminus, an NLS, a first peptide linker, a peptide tag, a second peptide linker, and a DNA polymerase domain. In some embodiments, the second polypeptide may further comprise a second NLS located C-terminally of the DNA polymerase domain. In such embodiments, the second NLS may be attached to the DNA polymerase via a third peptide linker. Exemplary first and second polypeptide sequences can be found in Table 21.

[0127] In some embodiments, the first polypeptide comprises, from N-terminus to C-terminus, a DNA binding domain, a first peptide linker, an NLS, an optional second peptide linker, and a single-domain antibody amino acid sequence. In some embodiments, the first peptide may further comprise a second NLS located N-terminally of the DNA binding domain. In such embodiments, the second NLS may be attached to the DNA binding domain via a third peptide linker. In some embodiments, the second polypeptide comprises, from N-terminus to C-terminus, a peptide tag, a first peptide linker, an NLS, a second peptide linker, and a DNA polymerase domain. In some embodiments, the second peptide may further comprise a second NLS located C-terminally of the DNA polymerase domain. In such embodiments, the second NLS may be attached to the DNA polymerase domain via a third peptide linker.

[0128] In some embodiments, the first polypeptide comprises, from N-terminus to C-terminus, a DNA binding domain, a first peptide linker, an NLS, a second peptide linker, and a peptide tag. In some embodiments, the first polypeptide may further comprise a second NLS located N-terminally of the DNA binding domain. In such embodiments, the second NLS may be connected to the DNA binding domain via a third peptide linker. In some embodiments, the second polypeptide comprises, from N-terminus to C-terminus, a single-domain antibody amino acid sequence, an optional first peptide linker, an NLS, a second peptide linker, and a DNA polymerase domain. In some embodiments, the second polypeptide further comprises a second NLS located C-terminally of the DNA polymerase domain. In such embodiments, the second NLS may be attached to the DNA polymerase domain via a third peptide linker.

[0129] In some embodiments, the split prime editor comprises, from N-terminus to the C-terminus, a DNA binding domain, a first peptide linker, a peptide tag, a second peptide linker, a first nuclear localization sequence (NLS), a self-cleaving peptide, a second NLS, an optional third peptide linker, a single-domain antibody amino acid sequence, a fourth peptide linker, and a DNA polymerase domain. In some embodiments, the split prime editor further comprises a third NLS located N-terminally of the DNA binding domain. In such embodiments, the third NLS may be attached to the DNA binding domain via a fifth peptide linker. In some embodiments, the split prime editor further comprises a fourth NLS located C-terminally of the DNA polymerase domain. In such embodiments, the fourth NLS may be attached to the DNA polymerase domain via a sixth peptide linker.

[0130] In some embodiments, the split prime editor comprises, from N-terminus to the C-terminus, a DNA binding domain, a first peptide linker, a single-domain antibody amino acid sequence, an optional second linker, a first NLS, a self-cleaving peptide, a second NLS, a third peptide linker, a peptide tag, a fourth peptide linker, and a DNA polymerase domain. In some embodiments, the split prime editor further comprises a third NLS located N-terminally of the DNA binding domain. In such embodiments, the third NLS may be attached to the DNA binding domain via a fifth peptide linker. In some embodiments, the split prime editor further comprises a fourth NLS located C-terminally of the DNA polymerase domain. In such embodiments, the fourth NLS may be attached to the DNA polymerase domain via a sixth peptide linker.

[0131] In some embodiments, the split prime editor comprises, from N-terminus to the C-terminus, a DNA binding domain, a first peptide linker, a single-domain antibody amino acid sequence, an optional second peptide linker, a first NLS, a self-cleaving peptide, a second NLS, a third peptide linker, a peptide tag, a fourth peptide linker, and a DNA polymerase domain. In some embodiments, the split prime editor further comprises a third NLS located N-terminally of the DNA binding domain. In such embodiments, the third NLS may be attached to the DNA binding domain via a fifth peptide linker. In some embodiments, the split prime editor further comprises a fourth NLS located C-terminally of the DNA polymerase domain. In such embodiments, the fourth NLS may be attached to the DNA polymerase domain via a sixth peptide linker.

[0132] In some embodiments, the split prime editor comprises, from N-terminus to the C-terminus, a DNA binding domain, a first peptide linker, a peptide tag, a second peptide linker, a first NLS, a self-cleaving peptide, a second NLS, an optional third peptide linker, a single-domain antibody amino acid sequence, a fourth peptide linker, and a DNA polymerase domain. In some embodiments, the split prime editor further comprises a third NLS located N-terminally of the DNA binding domain. In such embodiments, the third NLS may be attached to the DNA binding domain via a fifth peptide linker. In some embodiments, the split prime editor further comprises a fourth NLS located C-terminally of the DNA polymerase domain. In such embodiments, the fourth NLS may be attached to the DNA polymerase domain via a sixth peptide linker.

[0133] In some embodiments, the split prime editor system comprises a self-cleaving peptide linker between the first and second polypeptides and has an amino acid sequence as set forth in Table 18.

[0134] In some embodiments, the split prime editor comprises, from the N-terminus to the C-terminus, a first nuclear localization sequence (NLS), an spCas9 amino acid sequence, a first peptide linker, a SpotTag® peptide tag, a second peptide linker, a second NLS, a self-cleaving peptide, a third NLS, a third peptide linker, a single-domain antibody amino acid sequence, a fourth peptide linker, a reverse transcriptase amino acid sequence, a fifth peptide linker, and a fourth NLS (as shown in FIG. 1 and in Table 18).

[0135] In some embodiments, the split prime editor comprises, from the N-terminus to the C-terminus, a first NLS, an spCas9 amino acid sequence, a first peptide linker, a single-domain antibody amino acid sequence, a second NLS, a self-cleaving peptide, a third NLS, a second peptide linker, a SpotTag® peptide tag, a third peptide linker, a reverse transcriptase amino acid sequence, a fourth peptide linker, and a fourth NLS (as shown in FIG. 2 and in Table 18).

[0136] In some embodiments, the split prime editor comprises, from the N-terminus to the C-terminus, a first NLS, an spCas9 amino acid sequence, a first peptide linker, a single-domain antibody amino acid sequence, a second NLS, a self-cleaving peptide, a third NLS, a second peptide linker, a BC2 peptide tag, a third peptide linker, a reverse transcriptase amino acid sequence, a fourth peptide linker, and a fourth NLS (as shown in FIG. 3 and in Table 18).

[0137] In some embodiments, the split prime editor comprises, from the N-terminus to the C-terminus, a first NLS, an spCas9 amino acid sequence, a first peptide linker, a BC2 peptide tag, a second peptide linker, a second NLS, a self-cleaving peptide, a third NLS, a single-domain antibody amino acid sequence, a third peptide linker, a reverse transcriptase amino acid sequence, a fourth peptide linker, and a fourth NLS (as shown in FIG. 4 and in Table 18).

TABLE 18
Amino acid sequences of exemplary self-cleaving peptide split
prime editor systems

| SEQ ID NO: | Split prime editor configuration |
|---|---|
| 8005 | MKRTADGSEFESPKKKRKVDKKYSIGLDIGTNSVGWAVITDEYKVPSK |
| | KFKVLGNTDRHSIKKNLIGALLFDSGETAEATRLKRTARRRYTRRKNR |
| | ICYLQEIFSNEMAKVDDSFFHRLEESFLVEEDKKHERHPIFGNIVDEVA |
| | YHEKYPTIYHLRKKLVDSTDKADLRLIYLALAHMIKFRGHFLIEGDLNP |
| | DNSDVDKLFIQLVQTYNQLFEENPINASGVDAKAILSARLSKSRRLENL |
| | IAQLPGEKKNGLFGNLIALSLGLTPNFKSNFDLAEDAKLQLSKDTYDD |
| | DLDNLLAQIGDQYADLFLAAKNLSDAILLSDILRVNTEITKAPLSASMI |
| | KRYDEHHQDLTLLKALVRQQLPEKYKEIFFDQSKNGYAGYIDGGASQ |
| | EEFYKFIKPILEKMDGTEELLVKLNREDLLRKQRTFDNGSIPHQIHLGEL |
| | HAILRRQEDFYPFLKDNREKIEKILTFRIPYYVGPLARGNSRFAWMTRK |
| | SEETITPWNFEEVVDKGASAQSFIERMTNFDKNLPNEKVLPKHSLLYE |
| | YFTVYNELTKVKYVTEGMRKPAFLSGEQKKAIVDLLFKTNRKVTVKQ |
| | LKEDYFKKIECFDSVEISGVEDRFNASLGTYHDLLKIIKDKDFLDNEEN |
| | EDILEDIVLTLTLFEDREMIEERLKTYAHLFDDKVMKQLKRRRYTGWG |
| | RLSRKLINGIRDKQSGKTILDFLKSDGFANRNFMQLIHDDSLTFKEDIQ |
| | KAQVSGQGDSLHEHIANLAGSPAIKKGILQTVKVVDELVKVMGRHKP |
| | ENIVIEMARENQTTQKGQKNSRERMKRIEEGIKELGSQILKEHPVENTQ |
| | LQNEKLYLYYLQNGRDMYVDQELDINRLSDYDVDAIVPQSFLKDDSI |
| | DNKVLTRSDKNRGKSDNVPSEEVVKKMKNYWRQLLNAKLITQRKFD |
| | NLTKAERGGLSELDKAGFIKRQLVETRQITKHVAQILDSRMNTKYDEN |
| | DKLIREVKVITLKSKLVSDFRKDFQFYKVREINNYHHAHDAYLNAVV |
| | GTALIKKYPKLESEFVYGDYKVYDVRKMIAKSEQEIGKATAKYFFYSN |
| | IMNFFKTEITLANGEIRKRPLIETNGETGEIVWDKGRDFATVRKVLSMP |
| | QVNIVKKTEVQTGGFSKESILPKRNSDKLIARKKDWDPKKYGGFDSPT |
| | VAYSVLVVAKVEKGKSKKLKSVKELLGITIMERSSFEKNPIDFLEAKG |
| | YKEVKKDLIIKLPKYSLFELENGRKRMLASAGELQKGNELALPSKYVN |
| | FLYLASHYEKLKGSPEDNEQKQLFVEQHKHYLDEIIEQISEFSKRVILA |
| | DANLDKVLSAYNKHRDKPIREQAENIIHLFTLTNLGAPAAFKYFDTTID |
| | RKRYTSTKEVLDATLIHQSITGLYETRIDLSQLGGDSGGSSGGSSGSPD |
| | RVRAVSHWSSGGSKRTADGSEFESPKKKRKVATNFSLLKQAGDVEEN |
| | PGPKRTADGSEFESPKKKRKVGGSQVQLVESGGGLVQPGGSLTLSCTA |
| | SGFTLDHYDIGWFRQAPGKEREGVSCINNSDDDTYYADSVKGRFTIFN |
| | NAKDTVYLQMNSLKPEDTAIYYCAEARGCKRGRYEYDFWGQGTQVT |
| | VSSKKKNIEDEYRLHETSKEPDVSLGSTWLSDFPQAWAETGGMGLAV |
| | RQAPLIIPLKATSTPVSIKQYPMSQEARLGIKPHIQRLLDQGILVPCQSP |
| | WNTPLLPVKKPGTNDYRPVQDLREVNKRVEDIHPTVPNPYNLLSGLPP |
| | SHQWYTVLDLKDAFFCLRLHPTSQPLFAFEWRDPEMGISGQLTWTRLP |
| | QGFKNSPTLFNEALHRDLADFRIQHPDLILLQYVDDLLLAATSELDCQ |
| | QGTRALLQTLGNLGYRASAKKAQICQKQVKYLGYLLKEGQRWLTEA |
| | RKETVMGQPTPKTPRQLREFLGKAGFCRLFIPGFAEMAAPLYPLTKPG |
| | TLFNWGPDQQKAYQEIKQALLTAPALGLPDLTKPFELFVDEKQGYAK |
| | GVLTQKLGPWRRPVAYLSKKLDPVAAGWPPCLRMVAAIAVLTKDAG |
| | KLTMGQPLVILAPHAVEALVKQPPDRWLSNARMTHYQALLLDTDRV |
| | QFGPVVALNPATLLPLPEEGLQHNCLDILAEAHGTRPDLTDQPLPDAD |
| | HTWYTDGSSLLQEGQRKAGAAVTTETEVIWAKALPAGTSAQRAELIA |
| | LTQALKMAEGKKLNVYTDSRYAFATAHIHGEIYRRRGWLTSEGKEIK |
| | NKDEILALLKALFLPKRLSIIHCPGHQKGHSAEARGNRMADQAARKAA |
| | ITETPDTSTLLIENSSPSGGSKRTADGSEFEPKKKRKV- |
| 8006 | MKRTADGSEFESPKKKRKVDKKYSIGLDIGTNSVGWAVITDEYKVPSK |
| | KFKVLGNTDRHSIKKNLIGALLFDSGETAEATRLKRTARRRYTRRKNR |
| | ICYLQEIFSNEMAKVDDSFFHRLEESFLVEEDKKHERHPIFGNIVDEVA |
| | YHEKYPTIYHLRKKLVDSTDKADLRLIYLALAHMIKFRGHFLIEGDLNP |
| | DNSDVDKLFIQLVQTYNQLFEENPINASGVDAKAILSARLSKSRRLENL |
| | IAQLPGEKKNGLFGNLIALSLGLTPNFKSNFDLAEDAKLQLSKDTYDD |
| | DLDNLLAQIGDQYADLFLAAKNLSDAILLSDILRVNTEITKAPLSASMI |
| | KRYDEHHQDLTLLKALVRQQLPEKYKEIFFDQSKNGYAGYIDGGASQ |
| | EEFYKFIKPILEKMDGTEELLVKLNREDLLRKQRTFDNGSIPHQIHLGEL |
| | HAILRRQEDFYPFLKDNREKIEKILTFRIPYYVGPLARGNSRFAWMTRK |
| | SEETITPWNFEEVVDKGASAQSFIERMTNFDKNLPNEKVLPKHSLLYE |
| | YFTVYNELTKVKYVTEGMRKPAFLSGEQKKAIVDLLFKTNRKVTVKQ |
| | LKEDYFKKIECFDSVEISGVEDRFNASLGTYHDLLKIIKDKDFLDNEEN |
| | EDILEDIVLTLTLFEDREMIEERLKTYAHLFDDKVMKQLKRRRYTGWG |
| | RLSRKLINGIRDKQSGKTILDFLKSDGFANRNFMQLIHDDSLTFKEDIQ |
| | KAQVSGQGDSLHEHIANLAGSPAIKKGILQTVKVVDELVKVMGRHKP |
| | ENIVIEMARENQTTQKGQKNSRERMKRIEEGIKELGSQILKEHPVENTQ |
| | LQNEKLYLYYLQNGRDMYVDQELDINRLSDYDVDAIVPQSFLKDDSI |
| | DNKVLTRSDKNRGKSDNVPSEEVVKKMKNYWRQLLNAKLITQRKFD |
| | NLTKAERGGLSELDKAGFIKRQLVETRQITKHVAQILDSRMNTKYDEN |
| | DKLIREVKVITLKSKLVSDFRKDFQFYKVREINNYHHAHDAYLNAVV |
| | GTALIKKYPKLESEFVYGDYKVYDVRKMIAKSEQEIGKATAKYFFYSN |
| | IMNFFKTEITLANGEIRKRPLIETNGETGEIVWDKGRDFATVRKVLSMP |
| | QVNIVKKTEVQTGGFSKESILPKRNSDKLIARKKDWDPKKYGGFDSPT |
| | VAYSVLVVAKVEKGKSKKLKSVKELLGITIMERSSFEKNPIDFLEAKG |
| | YKEVKKDLIIKLPKYSLFELENGRKRMLASAGELQKGNELALPSKYVN |
| | FLYLASHYEKLKGSPEDNEQKQLFVEQHKHYLDEIIEQISEFSKRVILA |
| | DANLDKVLSAYNKHRDKPIREQAENIIHLFTLTNLGAPAAFKYFDTTID |
| | RKRYTSTKEVLDATLIHQSITGLYETRIDLSQLGGDSGGSSGGSSGSQV |
| | QLVESGGGLVQPGGSLTLSCTASGFTLDHYDIGWFRQAPGKEREGVSC |
| | INNSDDDTYYADSVKGRFTIFNNAKDTVYLQMNSLKPEDTAIYYCAEA |
| | RGCKRGRYEYDFWGQGTQVTVSSKKKKRTADGSEFESPKKKRKVAT |
| | NFSLLKQAGDVEENPGPKRTADGSEFESPKKKRKVGGSPDRVRAVSH |
| | WSSGGSSGGSSGSNIEDEYRLHETSKEPDVSLGSTWLSDFPQAWAETG |
| | GMGLAVRQAPLIIPLKATSTPVSIKQYPMSQEARLGIKPHIQRLLDQGIL |
| | VPCQSPWNTPLLPVKKPGTNDYRPVQDLREVNKRVEDIHPTVPNPYNL |
| | LSGLPPSHQWYTVLDLKDAFFCLRLHPTSQPLFAFEWRDPEMGISGQL |
| | TWTRLPQGFKNSPTLFNEALHRDLADFRIQHPDLILLQYVDDLLLAATS |
| | ELDCQQGTRALLQTLGNLGYRASAKKAQICQKQVKYLGYLLKEGQR |
| | WLTEARKETVMGQPTPKTPRQLREFLGKAGFCRLFIPGFAEMAAPLYP |
| | LTKPGTLFNWGPDQQKAYQEIKQALLTAPALGLPDLTKPFELFVDEKQ |
| | GYAKGVLTQKLGPWRRPVAYLSKKLDPVAAGWPPCLRMVAAIAVLT |
| | KDAGKLTMGQPLVILAPHAVEALVKQPPDRWLSNARMTHYQALLLD |
| | TDRVQFGPVVALNPATLLPLPEEGLOHNCLDILAEAHGTRPDLTDQPL |
| | PDADHTWYTDGSSLLQEGQRKAGAAVTTETEVIWAKALPAGTSAQR |
| | AELIALTQALKMAEGKKLNVYTDSRYAFATAHIHGEIYRRRGWLTSE |
| | GKEIKNKDEILALLKALFLPKRLSIIHCPGHQKGHSAEARGNRMADQA |
| | ARKAAITETPDTSTLLIENSSPSGGSKRTADGSEFEPKKKRKV- |
| 8007 | MKRTADGSEFESPKKKRKVDKKYSIGLDIGTNSVGWAVITDEYKVPSK |
| | KFKVLGNTDRHSIKKNLIGALLFDSGETAEATRLKRTARRRYTRRKNR |
| | ICYLQEIFSNEMAKVDDSFFHRLEESFLVEEDKKHERHPIFGNIVDEVA |
| | YHEKYPTIYHLRKKLVDSTDKADLRLIYLALAHMIKFRGHFLIEGDLNP |
| | DNSDVDKLFIQLVQTYNQLFEENPINASGVDAKAILSARLSKSRRLENL |
| | IAQLPGEKKNGLFGNLIALSLGLTPNFKSNFDLAEDAKLQLSKDTYDD |
| | DLDNLLAQIGDQYADLFLAAKNLSDAILLSDILRVNTEITKAPLSASMI |
| | KRYDEHHQDLTLLKALVRQQLPEKYKEIFFDQSKNGYAGYIDGGASQ |
| | EEFYKFIKPILEKMDGTEELLVKLNREDLLRKQRTFDNGSIPHQIHLGEL |
| | HAILRRQEDFYPFLKDNREKIEKILTFRIPYYVGPLARGNSRFAWMTRK |
| | SEETITPWNFEEVVDKGASAQSFIERMTNFDKNLPNEKVLPKHSLLYE |
| | YFTVYNELTKVKYVTEGMRKPAFLSGEQKKAIVDLLFKTNRKVTVKQ |
| | LKEDYFKKIECFDSVEISGVEDRFNASLGTYHDLLKIIKDKDFLDNEEN |
| | EDILEDIVLTLTLFEDREMIEERLKTYAHLFDDKVMKQLKRRRYTGWG |
| | RLSRKLINGIRDKQSGKTILDFLKSDGFANRNFMQLIHDDSLTFKEDIQ |
| | KAQVSGQGDSLHEHIANLAGSPAIKKGILQTVKVVDELVKVMGRHKP |
| | ENIVIEMARENQTTQKGQKNSRERMKRIEEGIKELGSQILKEHPVENTQ |
| | LQNEKLYLYYLQNGRDMYVDQELDINRLSDYDVDAIVPQSFLKDDSI |
| | DNKVLTRSDKNRGKSDNVPSEEVVKKMKNYWRQLLNAKLITQRKFD |
| | NLTKAERGGLSELDKAGFIKRQLVETRQITKHVAQILDSRMNTKYDEN |
| | DKLIREVKVITLKSKLVSDFRKDFQFYKVREINNYHHAHDAYLNAVV |
| | GTALIKKYPKLESEFVYGDYKVYDVRKMIAKSEQEIGKATAKYFFYSN |
| | IMNFFKTEITLANGEIRKRPLIETNGETGEIVWDKGRDFATVRKVLSMP |
| | QVNIVKKTEVQTGGFSKESILPKRNSDKLIARKKDWDPKKYGGFDSPT |
| | VAYSVLVVAKVEKGKSKKLKSVKELLGITIMERSSFEKNPIDFLEAKG |
| | YKEVKKDLIIKLPKYSLFELENGRKRMLASAGELQKGNELALPSKYVN |
| | FLYLASHYEKLKGSPEDNEQKQLFVEQHKHYLDEIIEQISEFSKR VILA |
| | DANLDKVLSAYNKHRDKPIREQAENIIHLFTLTNLGAPAAFKYFDTTID |
| | RKRYTSTKEVLDATLIHQSITGLYETRIDLSQLGGDSGGSPDRRAAVSH |
| | WQSGGSSGGSSGSKRTADGSEFESPKKKRKVATNFSLLKQAGDVEEN |
| | PGPKRTADGSEFESPKKKRKVQVQLVESGGGLVQPGGSLTLSCTASGF |
| | TLDHYDIGWFRQAPGKEREGVSCINNSDDDTYYADSVKGRFTIFNNAK |
| | DTVYLQMNSLKPEDTAIYYCAEARGCKRGRYEYDFWGQGTQVTVSS |
| | KKKNIEDEYRLHETSKEPDVSLGSTWLSDFPQAWAETGGMGLAVRQA |
| | PLIIPLKATSTPVSIKQYPMSQEARLGIKPHIQRLLDQGILVPCQSPWNTP |
| | LLPVKKPGTNDYRPVQDLREVNKRVEDIHPTVPNPYNLLSGLPPSHQW |
| | YTVLDLKDAFFCLRLHPTSQPLFAFEWRDPEMGISGQLTWTRLPQGFK |
| | NSPTLFNEALHRDLADFRIQHPDLILLQYVDDLLLAATSELDCQQGTR |
| | ALLQTLGNLGYRASAKKAQICQKQVKYLGYLLKEGQRWLTEARKET |
| | VMGQPTPKTPRQLREFLGKAGFCRLFIPGFAEMAAPLYPLTKPGTLFN |
| | WGPDQQKAYQEIKQALLTAPALGLPDLTKPFELFVDEKQGYAKGVLT |
| | QKLGPWRRPVAYLSKKLDPVAAGWPPCLRMVAAIAVLTKDAGKLTM |
| | GQPLVILAPHAVEALVKQPPDRWLSNARMTHYQALLLDTDRVQFGPV |
| | VALNPATLLPLPEEGLQHNCLDILAEAHGTRPDLTDQPLPDADHTWYT |
| | DGSSLLQEGQRKAGAAVTTETEVIWAKALPAGTSAQRAELIALTQALK |
| | MAEGKKLNVYTDSRYAFATAHIHGEIYRRRGWLTSEGKEIKNKDEILA |
| | LLKALFLPKRLSIIHCPGHQKGHSAEARGNRMADQAARKAAITETPDT |
| | STLLIENSSPSGGSKRTADGSEFEPKKKRKV- |
| 8008 | MKRTADGSEFESPKKKRKVDKKYSIGLDIGTNSVGWAVITDEYKVPSK |
| | KFKVLGNTDRHSIKKNLIGALLFDSGETAEATRLKRTARRRYTRRKNR |
| | ICYLQEIFSNEMAKVDDSFFHRLEESFLVEEDKKHERHPIFGNIVDEVA |
| | YHEKYPTIYHLRKKLVDSTDKADLRLIYLALAHMIKFRGHFLIEGDLNP |
| | DNSDVDKLFIQLVQTYNQLFEENPINASGVDAKAILSARLSKSRRLENL |
| | IAQLPGEKKNGLFGNLIALSLGLTPNFKSNFDLAEDAKLQLSKDTYDD |
| | DLDNLLAQIGDQYADLFLAAKNLSDAILLSDILRVNTEITKAPLSASMI |
| | KRYDEHHQDLTLLKALVRQQLPEKYKEIFFDQSKNGYAGYIDGGASQ |
| | EEFYKFIKPILEKMDGTEELLVKLNREDLLRKQRTFDNGSIPHQIHLGEL |
| | HAILRRQEDFYPFLKDNREKIEKILTFRIPYYVGPLARGNSRFAWMTRK |
| | SEETITPWNFEEVVDKGASAQSFIERMTNFDKNLPNEKVLPKHSLLYE |
| | YFTVYNELTKVKYVTEGMRKPAFLSGEQKKAIVDLLFKTNRKVTVKQ |
| | LKEDYFKKIECFDSVEISGVEDRFNASLGTYHDLLKIIKDKDFLDNEEN |
| | EDILEDIVLTLTLFEDREMIEERLKTYAHLFDDKVMKQLKRRRYTGWG |
| | RLSRKLINGIRDKQSGKTILDFLKSDGFANRNFMQLIHDDSLTFKEDIQ |
| | KAQVSGQGDSLHEHIANLAGSPAIKKGILQTVKVVDELVKVMGRHKP |
| | ENIVIEMARENQTTQKGQKNSRERMKRIEEGIKELGSQILKEHPVENTQ |
| | LQNEKLYLYYLQNGRDMYVDQELDINRLSDYDVDAIVPQSFLKDDSI |
| | DNKVLTRSDKNRGKSDNVPSEEVVKKMKNYWRQLLNAKLITQRKFD |
| | NLTKAERGGLSELDKAGFIKRQLVETRQITKHVAQILDSRMNTKYDEN |
| | DKLIREVKVITLKSKLVSDFRKDFQFYKVREINNYHHAHDAYLNAVV |
| | GTALIKKYPKLESEFVYGDYKVYDVRKMIAKSEQEIGKATAKYFFYSN |
| | IMNFFKTEITLANGEIRKRPLIETNGETGEIVWDKGRDFATVRKVLSMP |
| | QVNIVKKTEVQTGGFSKESILPKRNSDKLIARKKDWDPKKYGGFDSPT |
| | VAYSVLVVAKVEKGKSKKLKSVKELLGITIMERSSFEKNPIDFLEAKG |
| | YKEVKKDLIIKLPKYSLFELENGRKRMLASAGELQKGNELALPSKYVN |
| | FLYLASHYEKLKGSPEDNEQKQLFVEQHKHYLDEIIEQISEFSKRVILA |
| | DANLDKVLSAYNKHRDKPIREQAENIIHLFTLTNLGAPAAFKYFDTTID |
| | RKRYTSTKEVLDATLIHQSITGLYETRIDLSQLGGDSGGSSGGSSGSQV |
| | QLVESGGGLVQPGGSLTLSCTASGFTLDHYDIGWFRQAPGKEREGVSC |
| | INNSDDDTYYADSVKGRFTIFNNAKDTVYLQMNSLKPEDTAIYYCAEA |
| | RGCKRGRYEYDFWGQGTQVTVSSKKKKRTADGSEFESPKKKRKVAT |
| | NFSLLKQAGDVEENPGPKRTADGSEFESPKKKRKVGGSPDRKAAVSH |
| | WQSSGGSSGGSSGSNIEDEYRLHETSKEPDVSLGSTWLSDFPQAWAET |
| | GGMGLAVRQAPLIIPLKATSTPVSIKQYPMSQEARLGIKPHIQRLLDQGI |
| | LVPCQSPWNTPLLPVKKPGTNDYRPVQDLREVNKRVEDIHPTVPNPYN |
| | LLSGLPPSHQWYTVLDLKDAFFCLRLHPTSQPLFAFEWRDPEMGISGQ |
| | LTWTRLPQGFKNSPTLFNEALHRDLADFRIQHPDLILLQYVDDLLLAA |
| | TSELDCQQGTRALLQTLGNLGYRASAKKAQICQKQVKYLGYLLKEGQ |
| | RWLTEARKETVMGQPTPKTPRQLREFLGKAGFCRLFIPGFAEMAAPLY |
| | PLTKPGTLFNWGPDQQKAYQEIKQALLTAPALGLPDLTKPFELFVDEK |
| | QGYAKGVLTQKLGPWRRPVAYLSKKLDPVAAGWPPCLRMVAAIAVL |
| | TKDAGKLTMGQPLVILAPHAVEALVKQPPDRWLSNARMTHYQALLL |
| | DTDRVQFGPVVALNPATLLPLPEEGLQHNCLDILAEAHGTRPDLTDQP |
| | LPDADHTWYTDGSSLLQEGQRKAGAAVTTETEVIWAKALPAGTSAQR |
| | AELIALTQALKMAEGKKLNVYTDSRYAFATAHIHGEIYRRRGWLTSE |
| | GKEIKNKDEILALLKALFLPKRLSIIHCPGHQKGHSAEARGNRMADQA |
| | ARKAAITETPDTSTLLIENSSPSGGSKRTADGSEFEPKKKRKV |

TABLE 21
Amino acid sequences of exemplary split prime editor systems
having the DNA binding domain fused to a single-domain antibody
(lacking a self-cleaving peptide)
DNA Binding Domain-Single-domain antibody peptide

| SEQ ID NO: | Sequence |
|---|---|
| 8009 | MKRTADGSEFESPKKKRKVDKKYSIGLDIGTNSVGWAVITDEYKVPSK |
| | KFKVLGNTDRHSIKKNLIGALLFDSGETAEATRLKRTARRRYTRRKNR |
| | ICYLQEIFSNEMAKVDDSFFHRLEESFLVEEDKKHERHPIFGNIVDEVA |
| | YHEKYPTIYHLRKKLVDSTDKADLRLIYLALAHMIKFRGHFLIEGDLNP |
| | DNSDVDKLFIQLVQTYNQLFEENPINASGVDAKAILSARLSKSRRLENL |
| | IAQLPGEKKNGLFGNLIALSLGLTPNFKSNFDLAEDAKLQLSKDTYDD |
| | DLDNLLAQIGDQYADLFLAAKNLSDAILLSDILRVNTEITKAPLSASMI |
| | KRYDEHHQDLTLLKALVRQQLPEKYKEIFFDQSKNGYAGYIDGGASQ |
| | EEFYKFIKPILEKMDGTEELLVKLNREDLLRKQRTFDNGSIPHQIHLGEL |
| | HAILRRQEDFYPFLKDNREKIEKILTFRIPYYVGPLARGNSRFAWMTRK |
| | SEETITPWNFEEVVDKGASAQSFIERMTNFDKNLPNEKVLPKHSLLYE |
| | YFTVYNELTKVKYVTEGMRKPAFLSGEQKKAIVDLLFKTNRKVTVKQ |
| | LKEDYFKKIECFDSVEISGVEDRFNASLGTYHDLLKIIKDKDFLDNEEN |
| | EDILEDIVLTLTLFEDREMIEERLKTYAHLFDDKVMKQLKRRRYTGWG |
| | RLSRKLINGIRDKQSGKTILDFLKSDGFANRNFMQLIHDDSLTFKEDIQ |
| | KAQVSGQGDSLHEHIANLAGSPAIKKGILQTVKVVDELVKVMGRHKP |
| | ENIVIEMARENQTTQKGQKNSRERMKRIEEGIKELGSQILKEHPVENTQ |
| | LQNEKLYLYYLQNGRDMYVDQELDINRLSDYDVDAIVPQSFLKDDSI |
| | DNKVLTRSDKNRGKSDNVPSEEVVKKMKNYWRQLLNAKLITQRKFD |
| | NLTKAERGGLSELDKAGFIKRQLVETRQITKHVAQILDSRMNTKYDEN |
| | DKLIREVKVITLKSKLVSDFRKDFQFYKVREINNYHHAHDAYLNAVV |
| | GTALIKKYPKLESEFVYGDYKVYDVRKMIAKSEQEIGKATAKYFFYSN |
| | IMNFFKTEITLANGEIRKRPLIETNGETGEIVWDKGRDFATVRKVLSMP |
| | QVNIVKKTEVQTGGFSKESILPKRNSDKLIARKKDWDPKKYGGFDSPT |
| | VAYSVLVVAKVEKGKSKKLKSVKELLGITIMERSSFEKNPIDFLEAKG |
| | YKEVKKDLIIKLPKYSLFELENGRKRMLASAGELQKGNELALPSKYVN |
| | FLYLASHYEKLKGSPEDNEQKQLFVEQHKHYLDEIIEQISEFSKRVILA |
| | DANLDKVLSAYNKHRDKPIREQAENIIHLFTLTNLGAPAAFKYFDTTID |
| | RKRYTSTKEVLDATLIHQSITGLYETRIDLSQLGGDSGGSPDRRAAVSH |
| | WQSGGSSGGSSGSKRTADGSEFESPKKKRKV |
| 8010 | KRTADGSEFESPKKKRKVGGSPDRVRAVSHWSSGGSSGGSSGSNIEDE |
| | YRLHETSKEPDVSLGSTWLSDFPQAWAETGGMGLAVRQAPLIIPLKAT |
| | STPVSIKQYPMSQEARLGIKPHIQRLLDQGILVPCQSPWNTPLLPVKKP |
| | GTNDYRPVQDLREVNKRVEDIHPTVPNPYNLLSGLPPSHQWYTVLDL |
| | KDAFFCLRLHPTSQPLFAFEWRDPEMGISGQLTWTRLPQGFKNSPTLF |
| | NEALHRDLADFRIQHPDLILLQYVDDLLLAATSELDCQQGTRALLQTL |
| | GNLGYRASAKKAQICQKQVKYLGYLLKEGQRWLTEARKETVMGQPT |
| | PKTPRQLREFLGKAGFCRLFIPGFAEMAAPLYPLTKPGTLFNWGPDQQ |
| | KAYQEIKQALLTAPALGLPDLTKPFELFVDEKQGYAKGVLTQKLGPW |
| | RRPVAYLSKKLDPVAAGWPPCLRMVAAIAVLTKDAGKLTMGQPLVIL |
| | APHAVEALVKQPPDRWLSNARMTHYQALLLDTDRVQFGPVVALNPA |
| | TLLPLPEEGLQHNCLDILAEAHGTRPDLTDQPLPDADHTWYTDGSSLL |
| | QEGQRKAGAAVTTETEVIWAKALPAGTSAQRAELIALTQALKMAEGK |
| | KLNVYTDSRYAFATAHIHGEIYRRRGWLTSEGKEIKNKDEILALLKAL |
| | FLPKRLSIIHCPGHQKGHSAEARGNRMADQAARKAAITETPDTSTLLIE |
| | NSSPSGGSKRTADGSEFEPKKKRKV |
| 8011 | KRTADGSEFESPKKKRKVGGSPDRKAAVSHWQSSGGSSGGSSGSNIED |
| | EYRLHETSKEPDVSLGSTWLSDFPQAWAETGGMGLAVRQAPLIIPLKA |
| | TSTPVSIKQYPMSQEARLGIKPHIQRLLDQGILVPCQSPWNTPLLPVKKP |
| | GTNDYRPVQDLREVNKRVEDIHPTVPNPYNLLSGLPPSHQWYTVLDL |
| | KDAFFCLRLHPTSQPLFAFEWRDPEMGISGQLTWTRLPQGFKNSPTLF |
| | NEALHRDLADFRIQHPDLILLQYVDDLLLAATSELDCQQGTRALLQTL |
| | GNLGYRASAKKAQICQKQVKYLGYLLKEGQRWLTEARKETVMGQPT |
| | PKTPRQLREFLGKAGFCRLFIPGFAEMAAPLYPLTKPGTLFNWGPDQQ |
| | KAYQEIKQALLTAPALGLPDLTKPFELFVDEKQGYAKGVLTQKLGPW |
| | RRPVAYLSKKLDPVAAGWPPCLRMVAAIAVLTKDAGKLTMGQPLVIL |
| | APHAVEALVKQPPDRWLSNARMTHYQALLLDTDRVQFGPVVALNPA |
| | TLLPLPEEGLQHNCLDILAEAHGTRPDLTDQPLPDADHTWYTDGSSLL |
| | QEGQRKAGAAVTTETEVIWAKALPAGTSAQRAELIALTQALKMAEGK |
| | KLNVYTDSRYAFATAHIHGEIYRRRGWLTSEGKEIKNKDEILALLKAL |
| | FLPKRLSIIHCPGHQKGHSAEARGNRMADQAARKAAITETPDTSTLLIE |
| | NSSPSGGSKRTADGSEFEPKKKRKV |

TABLE 20
Amino acid sequences of exemplary split prime editor systems
having the DNA polymerase domain fused to a single-domain
antibody (lacking a self-cleaving peptide)
(SEQ ID No. provided in left column)

| | |
|---|---|
| SEQ | |
| ID | |
| NO: | Sequence |

DNA Polymerase Domain-Single-domain antibody peptide

| | |
|---|---|
| 8012 | KRTADGSEFESPKKKRKVGGSQVQLVESGGGLVQPGGSLTLSCTASGFTL |
| | DHYDIGWFRQAPGKEREGVSCINNSDDDTYYADSVKGRFTIFNNAKDTV |
| | YLQMNSLKPEDTAIYYCAEARGCKRGRYEYDFWGQGTQVTVSSKKKNIE |
| | DEYRLHETSKEPDVSLGSTWLSDFPQAWAETGGMGLAVRQAPLIIPLKAT |
| | STPVSIKQYPMSQEARLGIKPHIQRLLDQGILVPCQSPWNTPLLPVKKPGT |
| | NDYRPVQDLREVNKRVEDIHPTVPNPYNLLSGLPPSHQWYTVLDLKDAF |
| | FCLRLHPTSQPLFAFEWRDPEMGISGQLTWTRLPQGFKNSPTLFNEALHR |
| | DLADFRIQHPDLILLQYVDDLLLAATSELDCQQGTRALLQTLGNLGYRAS |
| | AKKAQICQKQVKYLGYLLKEGQRWLTEARKETVMGQPTPKTPRQLREFL |
| | GKAGFCRLFIPGFAEMAAPLYPLTKPGTLFNWGPDQQKAYQEIKQALLTA |
| | PALGLPDLTKPFELFVDEKQGYAKGVLTQKLGPWRRPVAYLSKKLDPVA |
| | AGWPPCLRMVAAIAVLTKDAGKLTMGQPLVILAPHAVEALVKQPPDRW |
| | LSNARMTHYQALLLDTDRVQFGPVVALNPATLLPLPEEGLQHNCLDILAE |
| | AHGTRPDLTDQPLPDADHTWYTDGSSLLQEGQRKAGAAVTTETEVIWA |
| | KALPAGTSAQRAELIALTQALKMAEGKKLNVYTDSRYAFATAHIHGEIY |
| | RRRGWLTSEGKEIKNKDEILALLKALFLPKRLSIIHCPGHQKGHSAEARGN |
| | RMADQAARKAAITETPDTSTLLIENSSPSGGSKRTADGSEFEPKKKRKV |

Compatible DNA binding domain-peptide tag peptides

| | |
|---|---|
| 8013 | MKRTADGSEFESPKKKRKVDKKYSIGLDIGTNSVGWAVITDEYKVPSKK |
| | FKVLGNTDRHSIKKNLIGALLFDSGETAEATRLKRTARRRYTRRKNRICY |
| | LQEIFSNEMAKVDDSFFHRLEESFLVEEDKKHERHPIFGNIVDEVAYHEKY |
| | PTIYHLRKKLVDSTDKADLRLIYLALAHMIKFRGHFLIEGDLNPDNSDVD |
| | KLFIQLVQTYNQLFEENPINASGVDAKAILSARLSKSRRLENLIAQLPGEK |
| | KNGLFGNLIALSLGLTPNFKSNFDLAEDAKLQLSKDTYDDDLDNLLAQIG |
| | DQYADLFLAAKNLSDAILLSDILRVNTEITKAPLSASMIKRYDEHHQDLTL |
| | LKALVRQQLPEKYKEIFFDQSKNGYAGYIDGGASQEEFYKFIKPILEKMD |
| | GTEELLVKLNREDLLRKQRTFDNGSIPHQIHLGELHAILRRQEDFYPFLKD |
| | NREKIEKILTFRIPYYVGPLARGNSRFAWMTRKSEETITPWNFEEVVDKG |
| | ASAQSFIERMTNFDKNLPNEKVLPKHSLLYEYFTVYNELTKVKYVTEGM |
| | RKPAFLSGEQKKAIVDLLFKTNRKVTVKQLKEDYFKKIECFDSVEISGVE |
| | DRFNASLGTYHDLLKIIKDKDFLDNEENEDILEDIVLTLTLFEDREMIEERL |
| | KTYAHLFDDKVMKQLKRRRYTGWGRLSRKLINGIRDKQSGKTILDFLKS |
| | DGFANRNFMQLIHDDSLTFKEDIQKAQVSGQGDSLHEHIANLAGSPAIKK |
| | GILQTVKVVDELVKVMGRHKPENIVIEMARENQTTQKGQKNSRERMKRI |
| | EEGIKELGSQILKEHPVENTQLQNEKLYLYYLQNGRDMYVDQELDINRLS |
| | DYDVDAIVPQSFLKDDSIDNKVLTRSDKNRGKSDNVPSEEVVKKMKNY |
| | WRQLLNAKLITQRKFDNLTKAERGGLSELDKAGFIKRQLVETRQITKHVA |
| | QILDSRMNTKYDENDKLIREVKVITLKSKLVSDFRKDFQFYKVREINNYH |
| | HAHDAYLNAVVGTALIKKYPKLESEFVYGDYKVYDVRKMIAKSEQEIGK |
| | ATAKYFFYSNIMNFFKTEITLANGEIRKRPLIETNGETGEIVWDKGRDFAT |
| | VRKVLSMPQVNIVKKTEVQTGGFSKESILPKRNSDKLIARKKDWDPKKY |
| | GGFDSPTVAYSVLVVAKVEKGKSKKLKSVKELLGITIMERSSFEKNPIDFL |
| | EAKGYKEVKKDLIIKLPKYSLFELENGRKRMLASAGELQKGNELALPSKY |
| | VNFLYLASHYEKLKGSPEDNEQKQLFVEQHKHYLDEIIEQISEFSKRVILA |
| | DANLDKVLSAYNKHRDKPIREQAENIIHLFTLTNLGAPAAFKYFDTTIDRK |
| | RYTSTKEVLDATLIHQSITGLYETRIDLSQLGGDSGGSSGGSSGSPDRVRA |
| | VSHWSSGGSKRTADGSEFESPKKKRKV |
| 8009 | MKRTADGSEFESPKKKRKVDKKYSIGLDIGTNSVGWAVITDEYKVPSKK |
| | FKVLGNTDRHSIKKNLIGALLFDSGETAEATRLKRTARRRYTRRKNRICY |
| | LQEIFSNEMAKVDDSFFHRLEESFLVEEDKKHERHPIFGNIVDEVAYHEKY |
| | PTIYHLRKKLVDSTDKADLRLIYLALAHMIKFRGHFLIEGDLNPDNSDVD |
| | KLFIQLVQTYNQLFEENPINASGVDAKAILSARLSKSRRLENLIAQLPGEK |
| | KNGLFGNLIALSLGLTPNFKSNFDLAEDAKLQLSKDTYDDDLDNLLAQIG |
| | DQYADLFLAAKNLSDAILLSDILRVNTEITKAPLSASMIKRYDEHHQDLTL |
| | LKALVRQQLPEKYKEIFFDQSKNGYAGYIDGGASQEEFYKFIKPILEKMD |
| | GTEELLVKLNREDLLRKQRTFDNGSIPHQIHLGELHAILRRQEDFYPFLKD |
| | NREKIEKILTFRIPYYVGPLARGNSRFAWMTRKSEETITPWNFEEVVDKG |
| | ASAQSFIERMTNFDKNLPNEKVLPKHSLLYEYFTVYNELTKVKYVTEGM |
| | RKPAFLSGEQKKAIVDLLFKTNRKVTVKQLKEDYFKKIECFDSVEISGVE |
| | DRFNASLGTYHDLLKIIKDKDFLDNEENEDILEDIVLTLTLFEDREMIEERL |
| | KTYAHLFDDKVMKQLKRRRYTGWGRLSRKLINGIRDKQSGKTILDFLKS |
| | DGFANRNFMQLIHDDSLTFKEDIQKAQVSGQGDSLHEHIANLAGSPAIKK |
| | GILQTVKVVDELVKVMGRHKPENIVIEMARENQTTQKGQKNSRERMKRI |
| | EEGIKELGSQILKEHPVENTQLQNEKLYLYYLQNGRDMYVDQELDINRLS |
| | DYDVDAIVPQSFLKDDSIDNKVLTRSDKNRGKSDNVPSEEVVKKMKNY |
| | WRQLLNAKLITQRKFDNLTKAERGGLSELDKAGFIKRQLVETRQITKHVA |
| | QILDSRMNTKYDENDKLIREVKVITLKSKLVSDFRKDFQFYKVREINNYH |
| | HAHDAYLNAVVGTALIKKYPKLESEFVYGDYKVYDVRKMIAKSEQEIGK |
| | ATAKYFFYSNIMNFFKTEITLANGEIRKRPLIETNGETGEIVWDKGRDFAT |
| | VRKVLSMPQVNIVKKTEVQTGGFSKESILPKRNSDKLIARKKDWDPKKY |
| | GGFDSPTVAYSVLVVAKVEKGKSKKLKSVKELLGITIMERSSFEKNPIDFL |
| | EAKGYKEVKKDLIIKLPKYSLFELENGRKRMLASAGELQKGNELALPSKY |
| | VNFLYLASHYEKLKGSPEDNEQKQLFVEQHKHYLDEIIEQISEFSKR VILA |
| | DANLDKVLSAYNKHRDKPIREQAENIIHLFTLTNLGAPAAFKYFDTTIDRK |
| | RYTSTKEVLDATLIHQSITGLYETRIDLSQLGGDSGGSPDRRAAVSHWQS |
| | GGSSGGSSGSKRTADGSEFESPKKKRKV |

[0138] Disclosed herein, in some embodiments, are compositions, systems, and methods using a split prime editor. In some embodiments, the split prime editor comprises a DNA binding domain and a DNA polymerase domain, wherein the split prime editor comprises a first polypeptide comprising a first amino acid sequence and a second polypeptide comprising a second amino acid sequence. In some embodiments, the first amino acid sequence forms at least a portion of the DNA binding domain. In certain embodiments, the first amino acid sequence forms the DNA binding domain.

[0139] In some embodiments, the first amino acid sequence forms at least a portion of the DNA polymerase domain. In certain embodiments, the first amino acid sequence forms the DNA polymerase domain.

[0140] In some embodiments, the first amino acid sequence forms at least a portion of the DNA binding domain. In certain embodiments, the first amino acid sequence forms the DNA binding domain.

[0141] In some embodiments, the first amino acid sequence forms the DNA binding domain and a portion of the DNA polymerase domain.

[0142] In some embodiments, the first amino acid sequence forms the DNA polymerase domain and a portion of the DNA binding domain.

[0143] In some embodiments, the second amino acid sequence forms at least a portion of the DNA binding domain. In certain embodiments, the second amino acid sequence forms the DNA binding domain.

[0144] In some embodiments, the second amino acid sequence forms at least a portion of the DNA polymerase domain. In certain embodiments, the second amino acid sequence forms the DNA polymerase domain.

[0145] In some embodiments, the second amino acid sequence forms the DNA binding domain and a portion of the DNA polymerase domain.

[0146] In some embodiments, the second amino acid sequence forms the DNA polymerase domain and a portion of the DNA binding domain.

[0147] In some embodiments, the first polypeptide and the second polypeptide are joined by a self-cleaving peptide. In some embodiments, the first polypeptide and the second polypeptide are covalently linked by a self-cleaving peptide. In some embodiments, the C-terminus of the second polypeptide and the N-terminus of the first polypeptide are linked by a self-cleaving peptide. In some embodiments, the N-terminus of the second polypeptide and the C-terminus of the first polypeptide are linked by a self-cleaving peptide. In some embodiments, the self-cleaving peptide has a sequence as set forth in Table 19 (e.g., 2A peptide, such as a P2A, E2A, T2A, a F2A peptide, a BmCPV2A peptide, or a BmFV2A peptide)

TABLE 19
Exemplary self-cleaving peptide sequence

| | Self- | |
|---|---|---|
| SEQ | cleaving | |
| ID NO: | peptide | Sequence |
| 8004 | P2A | ATNFSLLKQAGDVEENPGP |
| 8014 | E2A | QCTNYALLKLAGDVESNPGP |
| 8015 | T2A | EGRGSLLTCGDVEENPGP |
| 8016 | F2A | VKQTLNFDLLKLAGDVESNPGP |
| 8017 | BmCPV2A | RTAFDFQQDVFRSNYDLLKLSGDIESNPGP |
| 8018 | BmFV2A | PSIGNVARTLTRAKIEDELIRAGIESNPGP |

[0148] In certain embodiments, the first polypeptide and the second polypeptide are configured to passively assemble in a host cell to form the split prime editor.

[0149] In some embodiments, the first polypeptide has affinity for the second polypeptide.

[0150] In some embodiments, the second polypeptide has affinity for the first polypeptide.

[0151] In some embodiments, the first polypeptide comprises a single-domain antibody, the second polypeptide comprises a peptide tag, and the single-domain antibody is configured to bind to the peptide tag. In some embodiments, the first polypeptide comprises a peptide tag, the second polypeptide comprises a single-domain antibody, and the single-domain antibody is configured to bind to the peptide tag.

[0152] In some embodiments, the first polypeptide comprises a single-domain antibody (e.g., a NANOBODY®). In some embodiments, the single-domain antibody has the amino acid sequence disclosed in Table 17).

[0153] In some embodiments, the second polypeptide comprises a single-domain antibody (e.g., a NANOBODY®). In some embodiments, the single-domain antibody has the amino acid sequence in Table 17).

[0154] In some embodiments, the first polypeptide comprises a peptide tag (e.g., a SpotTag®, a BC2 tag) configured to bind to a single-domain antibody. In some embodiments, the second polypeptide comprises a peptide tag (e.g., a SpotTag®, a BC2 tag) configured to bind to a single-domain antibody. In some embodiments, the peptide tag has any one of the amino acid sequences of in Table 16). In some embodiments, the peptide tag is a SpotTag®, a BC2 tag, or a variant thereof.

[0155] In some embodiments, the first polypeptide and second polypeptide undergo directed evolution to, for example, increase affinity of the first polypeptide and the second polypeptide to each other. As used herein, “directed evolution” encompasses methods to design proteins with desirable functions and characteristics. In some embodiments, directed evolution generates random mutations in the gene of interest and requires no protein structure information. Directed evolution mimics natural evolution by imposing stringent selection and screening methodologies to identify proteins with optimized functionality, including affinity, binding, catalytic properties, thermal and environmental stability. Exemplary methods for performing directed evolution are described below in Table A. In some embodiments, the first and/or second polypeptide have undergone one of the methods of directed evolution listed in Table A.

[0156] The polypeptides that have undergone directed evolution may have an editing efficiency of at least about 5%, 10%, 15%, 20%, 25%, 30%, 35%, 40%, 45%, 50%, 55%, 60%, 65%, 70%, 75%, 80%, 85%, 90%, or 95% for example, when transfected into cells. The polypeptides that have undergone directed evolution may have an editing efficiency of at least about 5%, 10%, 15%, 20%, 25%, 30%, 35%, 40%, 45%, 50%, 55%, 60%, 65%, 70%, 75%, 80%, 85%, 90%, or 95% for example, when transduced into cells.

TABLE A
Exemplary Methods of Directed Evolution

| | |
|---|---|
| Method | Method Information |

Random

| | |
|---|---|
| Error-prone PCR | Employs polymerase to generate mutations |
| | by imposing nucleotide incorporation error |
| | during DNA replication |
| Sequence Saturation | Generates multiple, random single nucleotide |
| Mutagenesis (SeSaM) | mutations in a given gene sequence |
| Site-directed mutagenesis | Enables replication by use of primers with |
| | modified bases resulting in mismatch and |
| | variation at a given position |
| Cassette mutagenesis | Gene cassette or oligonucleotide used for |
| | site-directed mutagenesis |

Recombination

| | |
|---|---|
| DNA shuffling | Mutation and recombination of homologous |
| | genes |
| Staggered Extension | Modified annealing and extension steps |
| Protocol (StEP) | generating staggered fragments |
| Incremental Truncation for | Random recombination between two gene |
| the Creation of Hybrid | fragments |
| Enzymes (ITCHY) | |
| Random Chimeragenesis | Gene family shuffling with multiple |
| on Transient Templates | crossover events for every gene |
| (RACHITT) | |

[0157] In certain embodiments, the split prime editor further comprises an affinity moiety that has affinity for either the DNA binding domain or the DNA polymerase domain. In some embodiments, the affinity moiety has affinity for the DNA binding domain. In some embodiments, the affinity moiety has affinity for the DNA polymerase domain.

[0158] In some embodiments, the split prime editor comprises a peptide tag/antibody or antibody fragment system that facilities localization of the first and second polypeptides.

[0159] In some embodiments, the first polypeptide further comprises a peptide tag. In some embodiments, the second polypeptide further comprises a single domain antibody sequence. In some embodiments, the first polypeptide further comprises a single domain antibody sequence. In some embodiments, the second polypeptide further comprises a peptide tag.

[0160] Exemplary peptide tag/antibody or antibody fragment systems include the Spot-Tag® and BC2 systems. These systems include short peptide tag that binds to an antibody or antibody fragment. In some embodiments, the peptide tag is less than 50 amino acids (e.g., less than 49 amino acids, less than 48 amino acids, less than 47 amino acids, less than 46 amino acids, less than 45 amino acids, less than 44 amino acids, less than 43 amino acids, less than 42 amino acids, less than 41 amino acids, less than 40 amino acids, less than 39 amino acids, less than 38 amino acids, less than 37 amino acids, less than 36 amino acids, less than 35 amino acids, less than 34 amino acids, less than 33 amino acids, less than 32 amino acids, less than 31 amino acids, less than 30 amino acids, less than 29 amino acids, less than 28 amino acids, less than 27 amino acids, less than 26 amino acids, less than 25 amino acids, less than 24 amino acids, less than 23 amino acids, less than 22 amino acids, less than 21 amino acids, less than 20 amino acids, less than 19 amino acids, less than 18 amino acids, less than 17 amino acids, less than 16 amino acids, less than 15 amino acids, less than 14 amino acids, less than 13 amino acids, less than 12 amino acids, less than 11 amino acids, less than 10 amino acids, less than 9 amino acids, less than 8 amino acids, less than 7 amino acids, less than 6 amino acids, less than 5 amino acids, less than 4 amino acids, or less than 3 amino acids) in length.

[0161] The peptide tag may comprise any sequence set forth in Table 16. The single domain antibody sequence may comprise the sequence set forth in Table 17.

[0162] In some embodiments, the DNA binding domain and/or the DNA polymerase domain comprises a peptide tag (e.g., a SpotTag®, a BC2 tag, or variants thereof) that is configured to bind to the affinity moiety (e.g., an affinity moiety).

[0163] In some embodiments, the affinity moiety comprises an antibody or fragment thereof (e.g., a NANOBODY®). In some embodiments, the affinity moiety comprises a single-domain antibody (e.g., a NANOBODY®).

TABLE 17
Exemplary single-domain antibody sequence

| SEQ | |
|---|---|
| ID NO: | Single-domain antibody sequence |
| 8002 | QVQLVESGGGLVQPGGSLTLSCTASGFTLDHYDIGWFRQAP |
| | GKEREGVSCINNSDDDTYYADSVKGRFTIFNNAKDTVYLQM |
| | NSLKPEDTAIYYCAEARGCKRGRYEYDFWGQGTQVTVSSKK |
| | K |

TABLE 16
Exemplary peptide tag sequences

| SEQ ID NO: | Peptide Tag sequence |
|---|---|
| 8003 | PDRVRAVSHWS |
| 8019 | PDRKAAVSHWQ |
| 8020 | PDRRAAVSHWQ |

[0164] In certain embodiments, the affinity moiety has affinity for the DNA binding domain.

[0165] In certain embodiments, the affinity moiety has affinity for the DNA polymerase domain.

[0166] In some embodiments, wherein the affinity moiety is fused to the first polypeptide and has affinity for the second amino acid sequence.

[0167] In some embodiments, the affinity moiety is fused to the second polypeptide and has affinity for the first amino acid sequence.

[0168] The polypeptides including an affinity moiety may have an editing efficiency of at least about 5%, 10%, 15%, 20%, 25%, 30%, 35%, 40%, 45%, 50%, 55%, 60%, 65%, 70%, 75%, 80%, 85%, 90%, or 95%, for example, when transfected into cells. The polypeptides including an affinity moiety may have an editing efficiency of at least about 5%, 10%, 15%, 20%, 25%, 30%, 35%, 40%, 45%, 50%, 55%, 60%, 65%, 70%, 75%, 80%, 85%, 90%, or 95%, for example, when transduced into cells.

[0169] In some embodiments, the first polypeptide comprises a SpyTag peptide sequence and the second polypeptide comprises a SpyCatcher peptide sequence. The SpyCatcher-SpyTag system is a method for protein ligation. The system is based on a modified domain from a Streptococcus pyogenes surface protein (SpyCatcher), which recognizes a cognate 13-amino-acid peptide (SpyTag). Upon recognition, the SpyCatcher and SpyTag form a covalent isopeptide bond between the side chains of a lysine in SpyCatcher and an aspartate in SpyTag. This technology may be used, among other applications, to create covalently stabilized multi-protein complexes, to label proteins (e.g., for microscopy). The SpyTag system is versatile as the tag is a short, unfolded peptide that can be genetically fused to exposed positions in target proteins. Similarly, SpyCatcher can be fused to reporter proteins such as GFP, and to epitope or purification tags. Exemplary SpyCatcher Reagents are shown in Table 4.

TABLE 4
Exemplary SpyCatcher Reagents

| | | Bio-Rad |
|---|---|---|
| | | Catalog Number |
| Monovalent Format | | |
| SpyCatcher2 | SpyCatcher2 protein | TZC001 |
| SpyCatcher2-CYS | SpyCatcher2 with an engineered | TZC001CYS |
| | cysteine residue; use for site- | |
| | specific chemical conjugation | |
| | to a label of choice | |
| SpyCatcher2: Biotin | SpyCatcher2 conjugated to biotin | |
| SpyCatcher2: HRP | SpyCatcher2 conjugated to HRP | |
| SpyCatcher2: PE | Spycatcher2 conjugated to RPE | |
| SpyCatcher3 | SpyCatcher3 protein | TZC025 |
| SpyCatcher3-CYS | SpyCatcher3 with an engineered | TZC025CYS |
| | cysteine residue; use for site- | |
| | specific conjugation to a label | |
| | of choice | |
| Bivalent Format | | |
| BiSpyCatcher2 | BiSpyCatcher2 protein | TZC002 |
| BiSpyCatcher2-CYS | BiSpyCatcher2 with one engineered | TZC002CYS |
| | cysteine residue; use for site- | |
| | specific conjugation to a label | |
| | of choice | |
| BiSpyCatcher2-CYS3 | BiSpyCatcher2 with three engineered | TZC002CYS3 |
| | cysteine residues; use for site- | |
| | specific conjugation to a label | |
| | of choice | |
| BiSpyCatcher2: Biotin | BiSpyCatcher2 conjugated to biotin | |
| BiSpyCatcher2: HRP | BiSpyCatcher2 conjugated to HRP | |
| BiSpyCatcher2: PE | BiSpyCatcher2 conjugated to RPE | |
| Ig-like Format | | |
| hIgG1-FcSpyCatcher3 | SpyCatcher3 fused to the hinge | TZC009 |
| | region, CH2, and CH3 of human | |
| | IgG1 | |
| hIgG1- | hIgG1-FcSpyCatcher3 conjugated | |
| FcSpyCatcher3: Biotin | to biotin | |
| hIgG1-FcSpyCatcher3: | hIgG1-FcSpyCatcher3 conjugated | |
| HRP | to HRP | |
| hIgG2-FcSpyCatcher3 | SpyCatcher3 fused to the hinge | TZC016 |
| | region, CH2, and CH3 of human | |
| | IgG2 | |
| hIgG3-FcSpyCatcher3 | SpyCatcher3 fused to the hinge | TZC017 |
| | region, CH2, and CH3 of human | |
| | IgG3 | |
| hIgG4-FcSpyCatcher3 | SpyCatcher3 fused to the hinge | TZC018 |
| | region, CH2, and CH3 of human | |
| | IgG4 | |
| hIgG4-Pro- | SpyCatcher3 fused to the hinge | TZC019 |
| FcSpyCatcher3 | region, CH2, and CH3 of human | |
| | IgG4-Pro (S228P) | |
| hIgA-FcSpyCatcher3 | SpyCatcher3 fused to the hinge | TZC020 |
| | region, CH2, and CH3 of human | |
| | IgA | |
| mIgG2a-FcSpyCatcher3 | SpyCatcher3 fused to the hinge | TZC012 |
| | region, CH2, and CH3 of mouse | |
| | IgG2a | |
| rbIgG-FcSpyCatcher3 | SpyCatcher3 fused to the hinge | TZC013 |
| | region, CH2, and CH3 of rabbit | |
| | IgG | |

[0170] Orthogonal systems to the SpyCatcher-SpyTag system include SnoopTag-SnoopCatcher system, SdyTag-SdyCatcher system, DogTag-DogCatcher system, SpyTag-SpyDock system, and isopeptag-Pilin-C system.

[0171] The polypeptides including the SpyCatcher-SpyTag system may have an editing efficiency of at least about 5%, 10%, 15%, 20%, 25%, 30%, 35%, 40%, 45%, 50%, 55%, 60%, 65%, 70%, 75%, 80%, 85%, 90%, or 95%, for example, when transfected into cells. The polypeptides including the SpyCatcher-SpyTag system may have an editing efficiency of at least about 5%, 10%, 15%, 20%, 25%, 30%, 35%, 40%, 45%, 50%, 55%, 60%, 65%, 70%, 75%, 80%, 85%, 90%, or 95%, for example, when transduced into cells.

[0172] In certain embodiments, first polypeptide comprises a SnoopTag peptide sequence and the second polypeptide comprises a SnoopCatcher peptide sequence. The SnoopTag-SnoopCatcher system is derived from the adhesin RrgA of Streptococcus pneumonia. The peptide SnoopTag forms a spontaneous isopeptide bond to its protein partner SnoopCatcher.

[0173] The polypeptides including the SnoopTag-SnoopCatcher system may have an editing efficiency of at least about 5%, 10%, 15%, 20%, 25%, 30%, 35%, 40%, 45%, 50%, 55%, 60%, 65%, 70%, 75%, 80%, 85%, 90%, or 95%, for example, when transfected into cells. The polypeptides including the SnoopTag-SnoopCatcher system may have an editing efficiency of at least about 5%, 10%, 15%, 20%, 25%, 30%, 35%, 40%, 45%, 50%, 55%, 60%, 65%, 70%, 75%, 80%, 85%, 90%, or 95%, for example, when transduced into cells.

[0174] In some embodiments, the first polypeptide comprises a SdyTag peptide sequence and the second polypeptide comprises a SdyCatcher peptide sequence. The Sdy Tag-SdyCatcher system is derived from the Cna protein B-type (CnaB) domain of Streptococcus dysgalactiae.

[0175] In certain embodiments, the first polypeptide comprises a DogTag peptide sequence and the second polypeptide comprises a DogCatcher peptide sequence. The DogTag-DogCatcher system is derived from the adhesin RrgA of Streptococcus pneumonia.

[0176] The polypeptides including the SdyTag-SdyCatcher system may have an editing efficiency of at least about 5%, 10%, 15%, 20%, 25%, 30%, 35%, 40%, 45%, 50%, 55%, 60%, 65%, 70%, 75%, 80%, 85%, 90%, or 95%, for example, when transfected into cells. The polypeptides including the SdyTag-SdyCatcher system may have an editing efficiency of at least about 5%, 10%, 15%, 20%, 25%, 30%, 35%, 40%, 45%, 50%, 55%, 60%, 65%, 70%, 75%, 80%, 85%, 90%, or 95%, for example, when transduced into cells.

[0177] In some embodiments, the first polypeptide comprises a SpyTag peptide sequence and the second polypeptide comprises a SpyDock peptide sequence.

[0178] The polypeptides including the SdyTag-SdyDock system may have an editing efficiency of at least about 5%, 10%, 15%, 20%, 25%, 30%, 35%, 40%, 45%, 50%, 55%, 60%, 65%, 70%, 75%, 80%, 85%, 90%, or 95%, for example, when transfected into cells. The polypeptides including the SdyTag-SdyDock system may have an editing efficiency of at least about 5%, 10%, 15%, 20%, 25%, 30%, 35%, 40%, 45%, 50%, 55%, 60%, 65%, 70%, 75%, 80%, 85%, 90%, or 95%, for example, when transduced into cells.

[0179] In certain embodiments, the first polypeptide comprises an isopeptag peptide sequence and the second polypeptide comprises a Pilin-C peptide sequence. The isopeptag-Pilin-C system is derived from the pilin protein (Spy0128) of Streptococcus pyogenes.

[0180] The polypeptides including the isopeptag-Pilin-C system may have an editing efficiency of at least about 5%, 10%, 15%, 20%, 25%, 30%, 35%, 40%, 45%, 50%, 55%, 60%, 65%, 70%, 75%, 80%, 85%, 90%, or 95%, for example, when transfected into cells. The polypeptides including the isopeptag-Pilin-C may have an editing efficiency of at least about 5%, 10%, 15%, 20%, 25%, 30%, 35%, 40%, 45%, 50%, 55%, 60%, 65%, 70%, 75%, 80%, 85%, 90%, or 95%, for example, when transduced into cells.

[0181] In some embodiments, the split prime editor comprises a third polypeptide encoding a third amino acid sequence. In certain embodiments, the third amino acid sequence forms at least a portion of the DNA binding domain and/or the DNA polymerase domain.

[0182] In various embodiments, the split prime editors described herein may be delivered to cells as two or more fragments which become assembled inside the cell (either by passive assembly, or by active assembly, such as using split intein sequences) into a reconstituted split prime editor. In some cases, the self-assembly may be passive whereby the two or more split prime editor fragments or polypeptides associate inside the cell covalently or non-covalently to reconstitute the split prime editor. In other cases, the self-assembly may be catalyzed by dimerization domains installed on each of the fragments. In still other cases, the self-assembly may be catalyzed by split intein sequences installed on each of the split prime editor fragments.

[0183] Once delivered or expressed within a cell, the split intein domains of the different fragments associate and bind to one another, and then undergo trans-splicing, which results in the excision of the split-intein domains from each of the fragments, and a concomitant formation of a peptide bond between the fragments, thereby restoring the split prime editor.

[0184] In some embodiments, a split intein comprises two halves of an intein protein, which may be referred to as a N-terminal half of an intein, or intein-N, and a C-terminal half of an intein, or intein-C, respectively. In some embodiments, the intein-N and the intein-C may each be fused to a protein domain (the N-terminal and the C-terminal exteins). The exteins can be any protein or polypeptides, for example, any split prime editor polypeptide component. In some embodiments, the intein-N and intein-C of a split intein can associate non-covalently to form an active intein and catalyze a-trans splicing reaction. In some embodiments, the trans splicing reaction excises the two intein sequences and links the two extein sequences with a peptide bond. As a result, the intein-N and the intein-C are spliced out, and a protein domain linked to the intein-N is fused to a protein domain linked to the intein-C essentially in same way as a contiguous intein does. In some embodiments, a split-intein is derived from a eukaryotic intein, a bacterial intein, or an archaeal intein. Preferably, the split intein so-derived will possess only the amino acid sequences essential for catalyzing trans-splicing reactions. In some embodiments, an intein-N or an intein-C further comprise one or more amino acid substitutions as compared to a wild type intein-N or wild type intein-C, for example, amino acid substitutions that enhances the trans-splicing activity of the split intein. In some embodiments, the intein-C comprises 4 to 7 contiguous amino acid residues, wherein at least 4 amino acids of which are from the last β-strand of the intein from which it was derived. In some embodiments, the split intein is derived from a Ssp DnaE intein, e.g., Synechocytis sp. PCC6803, or any intein or split intein known in the art, or any functional variants or fragments thereof.

[0185] In one embodiment, the split prime editor can be delivered using a split-intein approach. In certain embodiments, the split site is located one or more polypeptide bond sites (i.e., a “split site or split-intein split site”), fused to a split intein, and then delivered to cells as separately-encoded fusion proteins. Once the split-intein fusion proteins (i.e., protein halves) are expressed within a cell, the proteins undergo trans-splicing to form a complete or whole split prime editor with the concomitant removal of the joined split-intein sequences. To take advantage of a split prime editor delivery strategy using split-inteins, the split prime editor needs to be divided at one or more split sites to create at least two separate halves of a split prime editor, each of which may be rejoined inside a cell if each half is fused to a split-intein sequence.

[0186] An exemplary split intein is the Ssp DnaE intein, which comprises two subunits, namely, DnaE-N and DnaE-C. The two different subunits are encoded by separate genes, namely dnaE-n and dnaE-c, which encode the DnaE-N and DnaE-C subunits, respectively. DnaE is a naturally occurring split intein in Synechocytis sp. PCC6803 and is capable of directing trans-splicing of two separate proteins, each comprising a fusion with either DnaE-N or DnaE-C.

[0187] Additional naturally occurring or engineered split-intein sequences are known in the or can be made from whole-intein sequences described herein or those available in the art.

[0188] Examples of split-intein sequences can be found in Stevens et al, “A promiscuous split intein with expanded protein engineering applications,” PNAS, 2017, Vol. 114:8538-8543; Iwai et al., “Highly efficient protein trans-splicing by a naturally split DnaE intein from Nostc punctiforme, FEBS Lett, 580:1853-1858, each of which are incorporated herein by reference. Additional split intein sequences can be found, for example, in WO 2013/045632, WO 2014/055782, WO 2016/069774, and EP2877490, the contents each of which are incorporated herein by reference.

[0189] In certain embodiments, the first polypeptide comprises a C-terminal intein sequence. In certain embodiments, wherein the second polypeptide comprises a N-terminal intein sequence. In some embodiments, assembly of the first polypeptide and the second polypeptide in a host cell results in fusion of the C-terminal intein sequence and the N-terminal intein sequence to generate a full intein sequence, which then results in splicing and excision of the full intein sequence.

[0190] The polypeptides including the intein sequence may have an editing efficiency of at least about 5%, 10%, 15%, 20%, 25%, 30%, 35%, 40%, 45%, 50%, 55%, 60%, 65%, 70%, 75%, 80%, 85%, 90%, or 95%, for example, when transfected into cells. The polypeptides including the intein sequence have an editing efficiency of at least about 5%, 10%, 15%, 20%, 25%, 30%, 35%, 40%, 45%, 50%, 55%, 60%, 65%, 70%, 75%, 80%, 85%, 90%, or 95%, for example, when transduced into cells.

[0191] In certain embodiments, the first polypeptide comprises a first affinity moiety and the second polypeptide comprises a second affinity moiety. In some embodiments, the first affinity moiety described herein has affinity for the second affinity moiety described herein.

[0192] In some embodiments, the first affinity moiety comprises a C-terminal leucine zipper monomer. In some embodiments, the second affinity moiety comprises an N-terminal leucine zipper monomer. In some embodiments, the C-terminal leucine zipper monomer and the N-terminal leucine zipper monomer forms a dimer in a host cell.

[0193] The polypeptides including leucine zippers may have an editing efficiency of at least about 5%, 10%, 15%, 20%, 25%, 30%, 35%, 40%, 45%, 50%, 55%, 60%, 65%, 70%, 75%, 80%, 85%, 90%, or 95% for example, when transfected into cells. The polypeptides including leucine zippers may have an editing efficiency of at least about 5%, 10%, 15%, 20%, 25%, 30%, 35%, 40%, 45%, 50%, 55%, 60%, 65%, 70%, 75%, 80%, 85%, 90%, or 95% for example, when transduced into cells. A benefit of using leucine zipper is to separate the polymerase and nuclease (or a portion of them), and allow them to fit within AAV vectors.

[0194] In some embodiments, the first affinity moiety comprises a C-terminal dimerization domain. In some embodiments, the second affinity moiety comprises a N-terminal dimerization domain. In certain embodiments, the C-terminal dimerization domain and the N-terminal dimerization domain form a dimer in a host cell. As used herein, a “dimerization domain” includes any protein domain that facilitates self-association of proteins to form dimers.

[0195] The polypeptides including dimerization domains may have an editing efficiency of at least about 5%, 10%, 15%, 20%, 25%, 30%, 35%, or 40%, 45%, 50%, 55%, 60%, 65%, 70%, 75%, 80%, 85%, 90%, or 95% for example, when transfected into cells. The polypeptides including dimerization domains may have an editing efficiency of at least about 5%, 10%, 15%, 20%, 25%, 30%, 35%, 40%, 45%, 50%, 55%, 60%, 65%, 70%, 75%, 80%, 85%, 90%, or 95%, for example, when transduced into cells.

[0196] In certain aspects, the prime editor systems described herein comprise a split prime editor comprising a DNA binding domain and a DNA polymerase domain, wherein the split prime editor comprises a first polypeptide comprising a first amino acid sequence, a second polypeptide comprising a second amino acid sequence, and a third polypeptide comprising a third amino acid sequence. The third amino acid sequence may comprise at least a portion of the DNA binding domain and/or at least a portion of the DNA polymerase domain.

### Prime Editing Compositions/Systems

[0197] Disclosed herein, in some embodiments, are compositions, systems, and methods using a prime editing composition or system. The term “prime editing composition” or “prime editing system” refers to compositions involved in the method of prime editing as described herein. A prime editing composition may include a split prime editor, e.g., a split prime editor comprising a DNA binding domain and a DNA polymerase domain, wherein the split prime editor comprises a first polypeptide comprising a first amino acid sequence and a second polypeptide comprising a second amino acid sequence. The composition may further include a PEgRNA. A prime editing composition may further comprise additional elements, such as second strand nicking ngRNAs. Components of a prime editing composition may be combined to form a complex for prime editing, or may be kept separately, e.g., for administration purposes.

[0198] In some embodiments, a prime editing composition comprises a split prime editor disclosed herein comprising at least two separate polypeptides, wherein at least one of the polypeptides is complexed with a PEgRNA and optionally complexed with a ngRNA. In some embodiments, the prime editing composition comprises a split prime editor comprising a DNA binding domain and a DNA polymerase domain associated with each other through a PERNA. For example, the prime editing composition may comprise a split prime editor comprising a DNA binding domain and a DNA polymerase domain linked to each other by an RNA-protein recruitment aptamer RNA sequence, which is linked to a PERNA. In some embodiments, a prime editing composition comprises a PEgRNA and a polynucleotide, a polynucleotide construct, or a vector that encodes a split prime editor disclosed herein.

[0199] In some embodiments, a prime editing composition comprises a PERNA, a ngRNA, and a polynucleotide, a polynucleotide construct, or a vector that encodes a split prime editor disclosed herein. In some embodiments, a prime editing composition comprises multiple polynucleotides, polynucleotide constructs, or vectors, each of which encodes one or more prime editing composition components (e.g., a first amino acid sequence that forms at least a portion of the DNA binding domain and a second amino acid sequence that form at least a portion of the DNA polymerase domain). In some embodiments, the PEgRNA of a prime editing composition is associated with the DNA binding domain, e.g., a Cas9 nickase, of the split prime editor. In some embodiments, the PEgRNA of a prime editing composition complexes with the DNA binding domain of a split prime editor and directs the split prime editor to the target DNA.

[0200] In some embodiments, a prime editing composition comprises one or more polynucleotides that encode split prime editor components and/or PERNA or ngRNAs. In some embodiments, a prime editing composition comprises a polynucleotide encoding a split prime editor comprising a DNA binding domain and a DNA polymerase domain. In some embodiments, a prime editing composition comprises (i) a polynucleotide encoding a protein comprising a DNA binding domain and a DNA polymerase domain, and (ii) a PEgRNA or a polynucleotide encoding the PEgRNA. In some embodiments, a prime editing composition comprises (i) a polynucleotide encoding a protein comprising a DNA binding domain and a DNA polymerase domain, (ii) a PERNA or a polynucleotide encoding the PEgRNA, and (iii) an ngRNA or a polynucleotide encoding the ngRNA. In some embodiments, a prime editing composition comprises (i) a polynucleotide encoding a DNA binding domain of a split prime editor, e.g., a Cas9 nickase, (ii) a polynucleotide encoding a DNA polymerase domain of a split prime editor, e.g., a reverse transcriptase, and (iii) a PEgRNA or a polynucleotide encoding the PEgRNA. In some embodiments, a prime editing composition comprises (i) a polynucleotide encoding a DNA binding domain of a split prime editor, e.g., a Cas9 nickase, (ii) a polynucleotide encoding a DNA polymerase domain of a split prime editor, e.g., a reverse transcriptase, (iii) a PEgRNA or a polynucleotide encoding the PEgRNA, and (iv) an ngRNA or a polynucleotide encoding the ngRNA.

[0201] In some embodiments, the at least one polynucleotide encoding the DNA binding domain or the polynucleotide encoding the DNA polymerase domain further encodes an additional polypeptide domain, e.g., an RNA-protein recruitment domain, and/or an adapter protein, such as an MS2 coat protein domain, a PP7 adapter protein, a Qβ adapter protein, a F2 adapter protein, a GA adapter protein, a fr adapter protein, a JP501 adapter protein, a M12 adapter protein, a R17 adapter protein, a BZ13 adapter protein, a JP34 adapter protein, a JP500 adapter protein, a KU1 adapter protein, a M11 adapter protein, a MX1 adapter protein, a TW18 adapter protein, a VK adapter protein, a SP adapter protein, a FI adapter protein, a ID2 adapter protein, a NL95 adapter protein, a TW 19 adapter protein, a AP205 adapter protein, a ϕCb5 adapter protein, a ϕCb8r adapter protein, a ϕ12r adapter protein, a ϕCb23r adapter protein, a 7s adapter protein, a PRR1 adapter protein, a leucine zipper monomer, a dimerization domain, an affinity moiety (e.g., antibody (e.g., NANOBODY®)), scaffold protein, a SpyTag peptide sequence, a SpyCatcher peptide sequence, a SnoopTag peptide sequence, a SnoopCatcher peptide sequence, a SdyTag peptide sequence, a SdyCatcher peptide sequence, a DogTag peptide sequence, a DogCatcher peptide sequence, and a SpyDock peptide sequence

[0202] In some embodiments, a prime editing composition comprises (i) a polynucleotide encoding a first polypeptide comprising a first amino acid sequence (e.g., the N-terminal half of a split prime editor) and an intein-N and (ii) a polynucleotide encoding a second polypeptide comprising a second amino acid sequence (e.g., the C-terminal half of the split prime editor) and an intein-C. In some embodiments, a prime editing composition comprises (i) a polynucleotide encoding a N-terminal half of the split prime editor and an intein-N(ii) a polynucleotide encoding a C-terminal half of the split prime editor and an intein-C, (iii) a PEgRNA or a polynucleotide encoding the PEgRNA, and/or (iv) an ngRNA or a polynucleotide encoding the ngRNA. In some embodiments, a prime editing composition comprises (i) a polynucleotide encoding a N-terminal portion of a DNA binding domain and an intein-N, (ii) a polynucleotide encoding a C-terminal portion of the DNA binding domain, an intein-C, and a DNA polymerase domain. In some embodiments, a prime editing composition comprises (i) a polynucleotide encoding a N-terminal portion of a DNA polymerase domain and an intein-N, (ii) a polynucleotide encoding a C-terminal portion of the DNA polymerase domain, an intein-C, and a DNA binding domain.

[0203] In some embodiments, the DNA binding domain is a Cas protein domain, e.g., a Cas9 nickase. In some embodiments, the prime editing composition comprises (i) a polynucleotide encoding a N-terminal portion of a DNA binding domain and an intein-N, (ii) a polynucleotide encoding a C-terminal portion of the DNA binding domain, an intein-C, and a DNA polymerase domain, (iii) a PEgRNA or a polynucleotide encoding the PEgRNA, and/or (iv) a ngRNA or a polynucleotide encoding the ngRNA.

[0204] In some embodiments, a prime editing composition comprises (i) a polynucleotide encoding a N-terminal portion of a DNA polymerase domain and an intein-N, (ii) a polynucleotide encoding a C-terminal portion of the DNA polymerase domain, an intein-C, and a DNA binding domain, and (iii) a PERNA or a polynucleotide encoding the PERNA, and/or (iv) a ngRNA or a polynucleotide encoding the ngRNA.

[0205] In some embodiments, a prime editing system comprises one or more polynucleotides encoding one or more split prime editor polypeptides, wherein activity of the prime editing system may be temporally regulated by controlling the timing in which the vectors are delivered. For example, in some embodiments, a polynucleotide encoding the split prime editor and a polynucleotide encoding a PERNA may be delivered simultaneously. For example, in some embodiments, a polynucleotide encoding the split prime editor and a polynucleotide encoding a PERNA may be delivered sequentially.

[0206] In some embodiments, a polynucleotide encoding a component of a prime editing system may further comprise an element that is capable of modifying the intracellular half-life of the polynucleotide and/or modulating translational control. In some embodiments, the polynucleotide is a RNA, for example, an mRNA. In some embodiments, the half-life of the polynucleotide, e.g., the RNA may be increased. In some embodiments, the half-life of the polynucleotide, e.g., the RNA may be decreased. In some embodiments, the element may be capable of increasing the stability of the polynucleotide, e.g., the RNA. In some embodiments, the element may be capable of decreasing the stability of the polynucleotide, e.g., the RNA. In some embodiments, the element may be within the 3′ UTR of the RNA. In some embodiments, the element may include a polyadenylation signal (PA). In some embodiments, the element may include a cap, e.g., an upstream mRNA or PEgRNA end. In some embodiments, the RNA may comprise no PA such that it is subject to quicker degradation in the cell after transcription.

[0207] In some embodiments, the element may include at least one AU-rich element (ARE). The AREs may be bound by ARE binding proteins (ARE-BPs) in a manner that is dependent upon tissue type, cell type, timing, cellular localization, and environment. In some embodiments the destabilizing element may promote RNA decay, affect RNA stability, or activate translation. In some embodiments, the ARE may comprise 50 to 150 nucleotides in length. In some embodiments, the ARE may comprise at least one copy of the sequence AUUUA. In some embodiments, at least one ARE may be added to the 3′ UTR of the RNA. In some embodiments, the element may be a Woodchuck Hepatitis Virus Posttranscriptional Regulatory Element (WPRE). In further embodiments, the element is a modified and/or truncated WPRE sequence that is capable of enhancing expression from the transcript. In some embodiments, the WPRE or equivalent may be added to the 3′ UTR of the RNA. In some embodiments, the element may be selected from other RNA sequence motifs that are enriched in either fast- or slow-decaying transcripts. In some embodiments, the polynucleotide, e.g., a vector, encoding the PE or the PEgRNA may be self-destroyed via cleavage of a target sequence present on the polynucleotide, e.g., a vector. The cleavage may prevent continued transcription of a PE or a PEgRNA.

[0208] Polynucleotides encoding prime editing composition components can be DNA, RNA, or any combination thereof. In some embodiments, a polynucleotide encoding a prime editing composition component is an expression construct. In some embodiments, a polynucleotide encoding a prime editing composition component is a vector. In some embodiments, the vector is a DNA vector. In some embodiments, the vector is a plasmid. In some embodiments, the vector is a virus vector, e.g., a retroviral vector, adenoviral vector, lentiviral vector, herpesvirus vector, or an adeno-associated virus vector (AAV).

[0209] In some embodiments, polynucleotides encoding polypeptide components of a prime editing composition are codon optimized by replacing at least one codon (e.g., about or more than about 1, 2, 3, 4, 5, 10, 15, 20, 25, 50, or more codons) of the native sequence with codons that are more frequently or most frequently used in the genes of that host cell while maintaining the native amino acid sequence. In some embodiments, a polynucleotide encoding a polypeptide component of a prime editing composition are operably linked to one or more expression regulatory elements, for example, a promoter, a 3′ UTR, a 5′ UTR, or any combination thereof. In some embodiments, a polynucleotide encoding a prime editing composition component is a messenger RNA (mRNA). In some embodiments, the mRNA comprises a Cap at the 5′ end and/or a poly A tail at the 3′ end.

### Split Prime Editor Nucleotide Polymerase Domain

[0210] In some embodiments, a split prime editor comprises a nucleotide polymerase domain, e.g., a DNA polymerase domain. The DNA polymerase domain may be a wild-type DNA polymerase domain, a full-length DNA polymerase protein domain, or may be a functional mutant, a functional variant, or a functional fragment thereof. In some embodiments, the polymerase domain is a template dependent polymerase domain. For example, the DNA polymerase may rely on a template polynucleotide strand, e.g., the editing template sequence, for new strand DNA synthesis. In some embodiments, the split prime editor comprises a DNA-dependent DNA polymerase. For example, a split prime editor having a DNA-dependent DNA polymerase can synthesize a new single stranded DNA using a PEgRNA editing template that comprises a DNA sequence as a template. In such cases, the PEgRNA is a chimeric or hybrid PEgRNA, and comprising an extension arm comprising a DNA strand. The chimeric or hybrid PEgRNA may comprise an RNA portion (including the spacer and the gRNA core) and a DNA portion (the extension arm comprising the editing template that includes a strand of DNA).

[0211] The DNA polymerases can be wild type polymerases from eukaryotic, prokaryotic, archael, or viral organisms, and/or the polymerases may be modified by genetic engineering, mutagenesis, or directed evolution-based processes. The polymerases can be a T7 DNA polymerase, T5 DNA polymerase, T4 DNA polymerase, Klenow fragment DNA polymerase, DNA polymerase III and the like. The polymerases can be thermostable, and can include Taq, Tne, Tma, Pfu, Tfl, Tth, Stoffel fragment, VENT® and DEEPVENT® DNA polymerases, KOD, Tgo, JDF3, and mutants, variants and derivatives thereof.

[0212] For synthesis of longer nucleic acid molecules (e.g., nucleic acid molecules longer than about 3-5 Kb in length), at least two DNA polymerases can be employed. In certain embodiments, one of the polymerases can be substantially lacking a 3′ exonuclease activity and the other may have a 3′ exonuclease activity. Such pairings may include polymerases that are the same or different. Examples of DNA polymerases substantially lacking in 3′ exonuclease activity include, but are not limited to, Taq, Tne(exo-), Tma(exo-), Pfu(exo-), Pwo(exo-), exo-KOD and Tth DNA polymerases, and any functional mutants, functional variants and functional fragments thereof.

[0213] In some embodiments, the DNA polymerase is a bacteriophage polymerase, for example, a T4, T7, or phi29 DNA polymerase. In some embodiments, the DNA polymerase is an archaeal polymerase, for example, pol I type archaeal polymerase or a pol II type archaeal polymerase. In some embodiments, the DNA polymerase comprises a thermostable archaeal DNA polymerase. In some embodiments, the DNA polymerase comprises a eubacterial DNA polymerase, for example, Pol I, Pol II, or Pol III polymerase. In some embodiments, the DNA polymerase is a Pol I family DNA polymerase. In some embodiments, the DNA polymerase is a E. coli Pol I DNA polymerase. In some embodiments, the DNA polymerase is a Pol II family DNA polymerase. In some embodiments, the DNA polymerase is a Pyrococcus furiosus (Pfu) Pol II DNA polymerase. In some embodiments, the DNA polymerase is a Pol IV family DNA polymerase. In some embodiments, the DNA polymerase is an E. coli Pol IV DNA polymerase.

[0214] In some embodiments, the DNA polymerase comprises a eukaryotic DNA polymerase. In some embodiments, the DNA polymerase is a Pol-beta DNA polymerase, a Pol-lambda DNA polymerase, a Pol-sigma DNA polymerase, or a Pol-mu DNA polymerase. In some embodiments, the DNA polymerase is a Pol-alpha DNA polymerase. In some embodiments, the DNA polymerase is a POLA1 DNA polymerase. In some embodiments, the DNA polymerase is a POLA2 DNA polymerase. In some embodiments, the DNA polymerase is a Pol-delta DNA polymerase. In some embodiments, the DNA polymerase is a POLD1 DNA polymerase. In some embodiments, the DNA polymerase is a POLD2 DNA polymerase. In some embodiments, the DNA polymerase is a human POLD1 DNA polymerase. In some embodiments, the DNA polymerase is a human POLD2 DNA polymerase. In some embodiments, the DNA polymerase is a POLD3 DNA polymerase. In some embodiments, the DNA polymerase is a POLD4 DNA polymerase. In some embodiments, the DNA polymerase is a Pol-epsilon DNA polymerase. In some embodiments, the DNA polymerase is a POLE1 DNA polymerase. In some embodiments, the DNA polymerase is a POLE2 DNA polymerase. In some embodiments, the DNA polymerase is a POLE3 DNA polymerase. In some embodiments, the DNA polymerase is a Pol-eta (POLH) DNA polymerase. In some embodiments, the DNA polymerase is a Pol-iota (POLI) DNA polymerase. In some embodiments, the DNA polymerase is a Pol-kappa (POLK) DNA polymerase. In some embodiments, the DNA polymerase is a Rev1 DNA polymerase. In some embodiments, the DNA polymerase is a human Rev1 DNA polymerase. In some embodiments, the DNA polymerase is a viral DNA-dependent DNA polymerase. In some embodiments, the DNA polymerase is a B family DNA polymerases. In some embodiments, the DNA polymerase is a herpes simplex virus (HSV) UL30 DNA polymerase. In some embodiments, the DNA polymerase is a cytomegalovirus (CMV) UL54 DNA polymerase.

[0215] In some embodiments, the DNA polymerase is an archaeal polymerase. In some embodiments, the DNA polymerase is a Family B/pol I type DNA polymerase. For example, in some embodiments, the DNA polymerase is a homolog of Pfu from Pyrococcus furiosus. In some embodiments, the DNA polymerase is a pol II type DNA polymerase. For example, in some embodiments, the DNA polymerase is a homolog of P. furiosus DP1/DP2 2-subunit polymerase. In some embodiments, the DNA polymerase lacks 5′ to 3′ nuclease activity. Suitable DNA polymerases (pol I or pol II) can be derived from archaea with optimal growth temperatures that are similar to the desired assay temperatures.

[0216] In some embodiments, the DNA polymerase comprises a thermostable archaeal DNA polymerase. In some embodiments, the thermostable DNA polymerase is isolated or derived from Pyrococcus species (furiosus, species GB-D, woesii, abysii, horikoshii), Thermococcus species (kodakaraensis KOD1, litoralis, species 9 degrees North-7, species JDF-3, gorgonarius), Pyrodictium occultum, and Archaeoglobus fulgidus.

[0217] Polymerases may also be from eubacterial species. In some embodiments, the DNA polymerase is a Pol I family DNA polymerase. In some embodiments, the DNA polymerase is an E. coli Pol I DNA polymerase. In some embodiments, the DNA polymerase is a Pol II family DNA polymerase. In some embodiments, the DNA polymerase is a Pyrococcus furiosus (Pfu) Pol II DNA polymerase. In some embodiments, the DNA polymerase is a Pol III family DNA polymerase. In some embodiments, the DNA polymerase is a Pol IV family DNA polymerase. In some embodiments, the DNA polymerase is an E. coli Pol IV DNA polymerase. In some embodiments, the Pol I DNA polymerase is a DNA polymerase functional variant that lacks or has reduced 5′ to 3′ exonuclease activity.

[0218] Suitable thermostable pol I DNA polymerases can be isolated from a variety of thermophilic eubacteria, including Thermus species and Thermotoga maritima such as Thermus aquaticus (Taq), Thermus thermophilus (Tth) and Thermotoga maritima (Tma UITma).

[0219] In some embodiments, a split prime editor comprises an RNA-dependent DNA polymerase domain, for example, a reverse transcriptase (RT). A RT or an RT domain may be a wild type RT domain, a full-length RT domain, or may be a functional mutant, a functional variant, or a functional fragment thereof. An RT or an RT domain of a split prime editor may comprise a wild-type RT, or may be engineered or evolved to contain specific amino acid substitutions, truncations, or variants. An engineered RT may comprise sequences or amino acid changes different from a naturally occurring RT. In some embodiments, the engineered RT may have improved reverse transcription activity over a naturally occurring RT or RT domain. In some embodiments, the engineered RT may have improved features over a naturally occurring RT, for example, improved thermostability, reverse transcription efficiency, or target fidelity. In some embodiments, a split prime editor comprising the engineered RT has improved prime editing efficiency over a split prime editor having a reference naturally occurring RT.

[0220] In some embodiments, a split prime editor comprises a virus RT, for example, a retrovirus RT. Non-limiting examples of virus RT include Moloney murine leukemia virus (M-MLV or MLVRT); human T-cell leukemia virus type 1 (HTLV-1) RT; bovine leukemia virus (BLV) RT; Rous Sarcoma Virus (RSV) RT; human immunodeficiency virus (HIV) RT, M-MFV RT, Avian Sarcoma-Leukosis Virus (ASLV) RT, Rous Sarcoma Virus (RSV) RT, Avian Myeloblastosis Virus (AMV) RT, Avian Erythroblastosis Virus (AEV) Helper Virus MCAV RT, Avian Myelocytomatosis Virus MC29 Helper Virus MCAV RT, Avian Reticuloendotheliosis Virus (REV-T) Helper Virus REV-A RT, Avian Sarcoma Virus UR2 Helper Virus (UR2AV) RT, Avian Sarcoma Virus Y73 Helper Virus YAV RT, Rous Associated Virus (RAV) RT, and Myeloblastosis Associated Virus (MAV) RT, all of which may be suitably used in the methods and composition described herein.

[0221] In some embodiments, the split prime editor comprises a wild type M-MLV RT. An exemplary sequence of a wild type M-MLV RT is provided in SEQ ID NO: 4448.

[0222] In some embodiments, the split prime editor comprises a M-MMLV RT comprising one or more of amino acid substitutions P51X, S67X, E69X, L139X, T197X, D200X, H204X, F209X, E302X, T306X, F309X, W313X, T330X, L345X, L435X, N454X, D524X, E562X, D583X, H594X, L603X, E607X, or D653X as compared to the wild type M-MMLV RT as set forth in SEQ ID NO: 4448, where X is any amino acid other than the wild type amino acid. In some embodiments, the split prime editor comprises a M-MMLV RT comprising one or more of amino acid substitutions P51L, S67K, E69K, L139P, T197A, D200N, H204R, F209N, E302K, E302R, T306K, F309N, W313F, T330P, L345G, L435G, N454K, D524G, E562Q, D583N, H594Q, L603W, E607K, and D653N as compared to the wild type M-MMLV RT as set forth in SEQ ID NO: 4448. In some embodiments, the split prime editor comprises a M-MLV RT comprising one or more amino acid substitutions D200N, T330P, L603W, T306K, and W313F as compared to the wild type M-MMLV RT as set forth in SEQ ID NO: 4448. In some embodiments, the split prime editor comprises a M-MLV RT comprising amino acid substitutions D200N, T330P, L603W, T306K, and W313F as compared to the wild type M-MMLV RT as set forth in SEQ ID NO: 4448. In some embodiments, a split prime editor comprising the D200N, T330P, L603W, T306K, and W313F as compared to the wild type M-MMLV RT may be referred to as a “PE2” split prime editor, and the corresponding prime editing system a PE2 prime editing system.

[0223] Exemplary wild type moloney murine leukemia virus reverse transcriptase:

(SEQ ID NO: 4448)
TLNIEDEYRLHETSKEPDVSLGSTWLSDFPQAWAETGGMGLAVRQAPLIIPLKAT
STPVSIKQYPMSQEARLGIKPHIQRLLDQGILVPCQSPWNTPLLPVKKPGTNDYRPVQDL
REVNKRVEDIHPTVPNPYNLLSGLPPSHQWYTVLDLKDAFFCLRLHPTSQPLFAFEWRD
PEMGISGQLTWTRLPQGFKNSPTLFDEALHRDLADFRIQHPDLILLQYVDDLLLAATSEL
DCQQGTRALLQTLGNLGYRASAKKAQICQKQVKYLGYLLKEGQRWLTEARKETVMGQ
PTPKTPRQLREFLGTAGFCRLWIPGFAEMAAPLYPLTKTGTLFNWGPDQQKAYQEIKQA
LLTAPALGLPDLTKPFELFVDEKQGYAKGVLTQKLGPWRRPVAYLSKKLDPVAAGWPP
CLRMVAAIAVLTKDAGKLTMGQPLVILAPHAVEALVKQPPDRWLSNARMTHYQALLL
DTDRVQFGPVVALNPATLLPLPEEGLQHNCLDILAEAHGTRPDLTDQPLPDADHTWYTD
GSSLLQEGQRKAGAAVTTETEVIWAKALPAGTSAQRAELIALTQALKMAEGKKLNVYT
DSRYAFATAHIHGEIYRRRGLLTSEGKEIKNKDEILALLKALFLPKRLSIIHCPGHQKGHS
AEARGNRMADQAARKAAITETPDTSTLLIENSSP.

In some embodiments, an RT variant may be a functional fragment of a reference RT that have 1, 2, 3, 4, 5, 6, 7, 8, 9, 10, 11, 12, 13, 14, 15, 16, 17, 18, 19, 20, 21, 22, 21, 24, 25, 26, 27, 28, 29, 30, 31, 32, 33, 34, 35, 36, 37, 38, 39, 40, 41, 42, 43, 44, 45, 46, 47, 48, 49, 50, or up to 100, or up to 200, or up to 300, or up to 400, or up to 500 or more amino acid changes compared to a reference RT, e.g., a wild type RT. In some embodiments, the RT variant comprises a fragment of a reference RT, e.g., a wild type RT, such that the fragment is about 70% identical, about 80% identical, about 90% identical, about 95% identical, about 96% identical, about 97% identical, about 98% identical, about 99% identical, about 99.5% identical, or about 99.9% identical to the corresponding fragment of the reference RT. In some embodiments, the fragment is 30%, 35%, 40%, 45%, 50%, 55%, 60%, 65%, 70%, 75%, 80%, 85%, 90%, 95% identical, 96%, 97%, 98%, 99%, or 99.5% of the amino acid length of a corresponding wild type RT (M-MLV reverse transcriptase) (e.g., SEQ ID NO: 4448).

[0224] In some embodiments, the RT functional fragment is at least 100 amino acids in length. In some embodiments, the fragment is at least 100, 150, 200, 250, 300, 350, 400, 450, 500, 550, or up to 600 or more amino acids in length.

[0225] In still other embodiments, the functional RT variant is truncated at the N-terminus or the C-terminus, or both, by a certain number of amino acids which results in a truncated variant which still retains sufficient DNA polymerase function. In some embodiments, the RT truncated variant has a truncation of at least 1, at least 2, at least 3, at least 4, at least 5, at least 6, at least 7, at least 8, at least 9, at least 10, at least 11, at least 12, at least 13, at least 14, at least 15, at least 16, at least 17, at least 18, at least 19, at least 20, at least 21, at least 22, at least 23, at least 24, at least 25, at least 30, 40, 50, 60, 70, 80, 90, 100, 110, 120, 130, 140, 150, 160, 170, 180, 190, 200, 210, 220, 230, 240, or 250 amino acids at the N-terminal end compared to a reference RT, e.g., a wild type RT. In some embodiments, the reference RT is a wild type M-MLV RT. In other embodiments, the RT truncated variant has a truncation of at least 1, at least 2, at least 3, at least 4, at least 5, at least 6, at least 7, at least 8, at least 9, at least 10, at least 11, at least 12, at least 13, at least 14, at least 15, at least 16, at least 17, at least 18, at least 19, at least 20, at least 21, at least 22, at least 23, at least 24, at least 25, at least 30, 40, 50, 60, 70, 80, 90, 100, 110, 120, 130, 140, 150, 160, 170, 180, 190, 200, 210, 220, 230, 240, or 250 amino acids at the C-terminal end compared to a reference RT, e.g., a wild type RT. In some embodiments, the reference RT is a wild type M-MLV RT. In still other embodiments, the RT truncated variant has a truncation at the N-terminal and the C-terminal end compared to a reference RT, e.g., a wild type RT. In some embodiments, the N-terminal truncation and the C-terminal truncation are of the same length. In some embodiments, the N-terminal truncation and the C-terminal truncation are of different lengths.

[0226] For example, the split prime editors disclosed herein may include a functional variant of a wild type M-MLV reverse transcriptase. In some embodiments, the split prime editor comprises a functional variant of a wild type M-MLV RT, wherein the functional variant of M-MLV RT is truncated after amino acid position 502 compared to a wild type M-MLV RT as set forth in SEQ ID NO: 4448. In some embodiments, the functional variant of M-MLV RT further comprises a D200X, T306X, W313X, and/or T330X amino acid substitution compared to compared to a wild type M-MLV RT as set forth in SEQ ID NO: 4448, wherein X is any amino acid other than the original amino acid. In some embodiments, the functional variant of M-MLV RT further comprises a D200N, T306K, W313F, and/or T330P amino acid substitution compared to compared to a wild type M-MLV RT as set forth in SEQ ID NO: 4448, wherein X is any amino acid other than the original amino acid. A DNA sequence encoding a split prime editor comprising this truncated RT is 522 bp smaller than PE2, and therefore makes its potentially useful for applications where delivery of the DNA sequence is challenging due to its size (i.e., adeno-associated virus and lentivirus delivery). In some embodiments, a split prime editor comprises a M-MLV RT variant, wherein the M-MLV RT consists of the following amino acid sequence:

(SEQ ID NO: 8001)
TLNIEDEYRLHETSKEPDVSLGSTWLSDFPQAWAETGGMGLAVRQAPLIIPLKATSTPVSI
KQYPMSQEARLGIKPHIQRLLDQGILVPCQSPWNTPLLPVKKPGTNDYRPVQDLREVNK
RVEDIHPTVPNPYNLLSGLPPSHQWYTVLDLKDAFFCLRLHPTSQPLFAFEWRDPEMGIS
GQLTWTRLPQGFKNSPTLFNEALHRDLADFRIQHPDLILLQYVDDLLLAATSELDCQQG
TRALLQTLGNLGYRASAKKAQICQKQVKYLGYLLKEGQRWLTEARKETVMGQPTPKT
PRQLREFLGKAGFCRLFIPGFAEMAAPLYPLTKPGTLFNWGPDQQKAYQEIKQALLTAP
ALGLPDLTKPFELFVDEKQGYAKGVLTQKLGPWRRPVAYLSKKLDPVAAGWPPCLRM
VAAIAVLTKDAGKLTMGQPLVILAPHAVEALVKQPPDRWLSNARMTHYQALLLDTDR
VQFGPVVALNPATLLPLPEEGLQHNCLDNSRLIN.

[0227] In some embodiments, a split prime editor comprises a eukaryotic RT, for example, a yeast, drosophila, rodent, or primate RT. In some embodiments, the split prime editor comprises a Group II intron RT, for example, a. Geobacillus stearothermophilus Group II Intron (GsI-IIC) RT or a Eubacterium rectale group II intron (Eu.re.I2) RT. In some embodiments, the split prime editor comprises a retron RT.

[0228] In some embodiments, the RT comprises an amino acid sequence having at least 90% (e.g., at least 91%, at least 92%, at least 93%, at least 94%, at least 95%, at least 96%, at least 97%, at least 98%, at least 99%, or at least 99.9%) sequence identity to any one sequence as set forth in Table 11, 12, or 13. In some embodiments, the RT comprises any one sequence as set forth in Table 11, 12, and Table 13.

[0229] In some embodiments, the DNA polymerase domain comprises any one of the sequences in Tables 11, 12 or 13.

TABLE 11
Exemplary RT Homolog (RT domain) Sequences

| SEQ | | | |
|---|---|---|---|
| ID | | Accession | |
| NO: | Amino acid Sequence | Number | Species |
| 8021 | HAQLLRSIKARFPDCTRKSVVRSGDESPLRTPGK | AAG17765 | Rhodomonas |
| | FEKAWRAKVTTRRLTKLIHNGCIILFGVRYHPG | | salina |
| | KGTSTSWSPFRIYWRPIATGVSRSNQDTFTSVDI | | |
| | MQRAKVTYFGGCGNMRYPTARKSHGYGASIIG | | |
| | FTRREAGLRLYTQNSAISDSSMTSCGIISKHRKF | | |
| | NKDKNFVNKRLINIIGDVQTLIVAYEFVKSKPGQ | | |
| | MVKGSIDSTLDDIDLAWIKSISKVIKAGKFKFIPS | | |
| | RRIYVSKTGCKERRPIMTGFPRDKLVQKAIQLV | | |
| | LEPIYENVFLENSHGFRPARGCHTALKSIKQGFH | | |
| | GVTWVIESDIASCFSSVNHEVLLSIIKERIKCVKT | | |
| | LALIRNLLESGYVDLGAFCKSKLGIPQGSSLSPL | | |
| | LCNIYLHKFDTFMYELKQRFVYTSSKDPRINPA | | |
| | YKRLQRQIQNTPGLVEKSKFIQELRKTPSKDLFD | | |
| | PKYRRLFYIRYADDFSIGITGQKKDAVEILDQAK | | |
| | IFLSEELKMDLKESKIRVVHLKKQSIFFLGTTIYG | | |
| | ISCVEKPMRTVKHSNWKTSIKIRVTPRVGLHAP | | |
| | MKVLLEKLLQNKFVKRDKEGIFKPTALGKLVN | | |
| | FDHADIIGYYNSVARGIMNYYSFVDNYSRLGSI | | |
| | VKYYLLHSCALTLALKYKLRFKSKAFKRFGGK | | |
| | LKCPDTKKEFFIPKNFFRTEKFSINPPDTEQVISK | | |
| | RWNNKLTKSSLFKACVICGTTPAEMYHVCKTR | | |
| | DLRNKYKTKKLDFFKFQMASFNQKQVPLCQFH | | |
| | HKSLHQGKLSEADKVAFREGITNL | | |
| 8022 | LPDTIERAVRSLPTVIRSGRKVNGLYRLLKSPLL | AAD03884 | Novosphingobium |
| | WEHAYQRIAPNKGAMTPGVDGQTFDGFSPDKV | | aromaticivorans |
| | RSIIERLANGTYRPQPARRVYIPKANGQKRPLGV | | |
| | PTTEDKLVQEVVRTILEQIYEPLFSRHSHGFRPK | | |
| | RSCHTALESIRAIWTGVKWLIDVDVVGFFDNID | | |
| | HDVLVSLLEKRIADRRFVRLIRGLLKAGYVEDW | | |
| | VFHKTYSGTPQGGVVSPMLANIYLHELDMFMQ | | |
| | AKMAGFDKGKQRSPSPDARRIRNRLSYVRRTV | | |
| | DQLRAKGRGDDPRVTSFLEEIGRLKAERLAVPA | | |
| | SDAFDPNYRRLRYCRYADDFIIGVTGSKSEARQI | | |
| | MEEVRTYLSDHLKLAVSAEKSGIHKASDGARFL | | |
| | GYEVRTMTNPNPHKAIFDGRPAVRRGLADRMK | | |
| | LLVPRDRVVRFVNSKEWGDYDSFRPVGRAALR | | |
| | FASDVEIVLAYNAEWRGFANYYAIADDVKRKL | | |
| | NKAGYFALLSCVKTIAGKHRTSARRVFAKLRR | | |
| | GTDFYISYEVGDTTRTIKLWQLKDLQRHTRTW | | |
| | GGIDIPSSAKFVFSRTELVERLNARECERCGSND | | |
| | QPCEVHHVRRIGELQHAGFSRHMAAARQRKRM | | |
| | VLCSRCHNDVHAGQPTDRQRRTARSRGEPNAL | | |
| | KGARSVRRGA | | |
| 8023 | ASKETGMFSLAGELASLVEESSSHVDDDSKPRS | NP_177575 | Arabidopsis |
| | RMELKRSLELRLKKRVKEQCINGKFSDLLKKVI | | thaliana |
| | ARPETLRDAYDCIRLNSNVSITERNGSVAFDSIA | | |
| | EELSSGVFDVASNTFSIVARDKTKEVLVLPSVAL | | |
| | KVVQEAIRIVLEVVFSPHFSKISHSCRSGRGRAS | | |
| | ALKYINNNISRSDWCFTLSLNKKLDVSVFENLLS | | |
| | VMEEKVEDSSLSILLRSMFEARVLNLEFGGFPK | | |
| | GHGLPQEGVLSRVLMNIYLDRFDHEFYRISMRH | | |
| | EALGLDSKTDEDSPGSKLRSWFRRQAGEQGLKS | | |
| | TTEQDVALRVYCCRFMDEIYFSVSGPKKVASDI | | |
| | RSEAIGFLRNSLHLDITDETDPSPCEATSGLRVL | | |
| | GTLVRKNVRESPTVKAVHKLKEKVRLFALQKE | | |
| | EAWTLGTVRIGKKWLGHGLKKVKESEIKGLAD | | |
| | SNSTLSQISCHRKAGMETDHWYKILLRIWMEDV | | |
| | LRTSADRSEEFVLSKHVVEPTVPQELRDAFYKF | | |
| | QNAAAAYVSSETANLEALLPCPQSHDRPVFFGD | | |
| | VVAPTNAIGRRLYRYGLITAKGYARSNSMLILL | | |
| | DTAQIIDWYSGLVRRWVIWYEGCSNFDEIKALI | | |
| | DNQIRMSCIRTLAAKYRIHENEIEKRLDLELSTIP | | |
| | SAEDIEQEIQHEKLDSPAFDRDEHLTYGLSNSGL | | |
| | CLLSLARLVSESRPCNCFVIGCSMAAPAVYTLH | | |
| | AMERQKFPGWKTGFSVCIPSSLNGRRIGLCKQH | | |
| | LKDLYIGQISLQAVDFGAWR | | |
| 8024 | NTSERASAHVSYTNWKAVQMYVTKLRQRIYRA | NP_832403 | Bacillus cereus |
| | EQLQQQRKVRKLQRLLMRSEANLLLSIRRVTQQ | | |
| | NKGKRTAGVDEHTALSRRERNLLYEQLKKLNT | | |
| | LQHRPKPAKRIYIVKKNGKLRPLGIPTIKDRVYQ | | |
| | NIVRNALEPQWEARFEAISYGFRPKRSTHDAIRS | | |
| | IFNRINGGTKKKWIVEGDFQGCFDHLNHEWILK | | |
| | QTSYFPGRKLLKRWLKMGYMEQSFFAETQEGT | | |
| | PQGGIISPLLANIALHGMEETLGITYKKNYKAND | | |
| | SYIMNPACKFTLIRYADDFVVLTETKEQALSVY | | |
| | MRLRPYLKDRGLELSPEKTKVTHIEEGFEFLGFL | | |
| | IRQYQTEQGNKLFIKPSKGSRQKAKKKIGDTLR | | |
| | VMRGQPIGEIIRVLNPIIRGYGQYWKHVVSKKIF | | |
| | GTMDSYIYWRIGKHLRQLHPKKSWKWIYARYY | | |
| | RHPHHGGNAWTPTCPKTNIQLLHMSWIKIERHN | | |
| | MVKFKNSPDDPTLKEYWEKRDRKVFDTENTM | | |
| | DRMKLARKQGYRCAICKTPLQNGEKVVVKDM | | |
| | PVPQHLILSNLNLKLVHLPCLY | | |
| 8025 | DSKDMQRLQTTQQRGYPLDREMEFQKTTEVHS | ZP_00778259 | Thermoanaerobacter |
| | ISSASRDGRNEVQRYTSKMLEMIVERGNMRAA | | ethanolicus |
| | YKRVVANKGSHGVDGMEVDELLPYLKENWPTI | | |
| | KQQLLEGKYKPQPVRRVEIPKPDGGVRLLGIPT | | |
| | ALDRLIQQAIAQILNRVYNHTFSDSSYGFRPGRS | | |
| | AKDAIKAAEAYINEGYTWVVDMDLEKFFDRVN | | |
| | HDIIMSKLEKRIGDKRVLKLIRRYLESGVMINGV | | |
| | KVSTEEGTPQGGPLSPLLANIMLDELDKELEKR | | |
| | GHKFCRYADDCNIYVKSRSAGNRVMKSIKKFIE | | |
| | SKLKLKVNEAKSAVDRPWRRKFLGFSFYTKEN | | |
| | EVRIRIHEKSIKRFKEKVREITNRNKGISMENRIK | | |
| | RLNQITTGWVNYFGLADAKSIMKTLDEWIRRRL | | |
| | RACIWKQWKKIKTKHDNLVKLGVEEQKAWEY | | |
| | ANTRKGYWRISNSPILNKTLTNKYFESIGYKSLS | | |
| | QRYLIVHNS | | |
| 8026 | QETKPFGISKNVVMMAFERVKANKGTYGMDE | ZP_00738538 | Bacillus |
| | QSIEMYEMDLKNNLYKLWNRMSSGSYFPKPVK | | thuringiensissero |
| | AVAIPKKNGGTRTLGIPTVEDRVAQMVAKLYFE | | varisraelensis |
| | PNVERLFYEDSYGYRPNKSAIQAIEATRKRCWR | | |
| | KDWVLEFDIKGLFDNIRHDYLIEMVKRHTNQE | | |
| | WVTLYVQRWLITPFQMEDGTLIERTAGTPQGG | | |
| | VISPVLANLFLHYTFDDFMVKEFSSIPWARYAD | | |
| | DGIAHCTSLKQAKYLQRRLEERFKLFGLELNLE | | |
| | KTKIAYCKDDDRQLSYPNTSFDFLGYTFRPRHA | | |
| | KNKHGKFFTNFSPAIADKAKKAIRKEVRSWRLQ | | |
| | LKADKTLQDISNMFNKKIQGWINYYGHFYKSE | | |
| | MYSVLRYINSSLIKWVRRKYKKRKHRRKAEYW | | |
| | LGTIAQRERKLFAHWKYGILPATNNGSRMS | | |
| 8027 | KKEKIDGWYKSGRNYLHFDEKVSFEKASRIVK | ZP_01457859 | Desulfovibrio |
| | NPRKVASWNFFPFLQTTVKTSKITRNDEGEIVPK | | vulgaris DP4 |
| | NKSRPISYAAHTDSHIYSYYATLLQPIYEKFIEKH | | |
| | GLGTNITGFRKLDGECNIDFAHRAFNAIRSMTPC | | |
| | IALSFDVKSFFDEIDHSILKQAWCTILEKTLLPED | | |
| | HFAIFKSLTTYSYVDRDDAFNAFGITKSSKKNGI | | |
| | RRICNPLEFRSILRPAGLIKRNKNSYGIPQGSPISG | | |
| | LLSNIYLFEFDKAISYFASDTKSHYYRYCDDIIIIC | | |
| | NEEHEELFKNLVSDELKKLNLRTNEKNVIRKFF | | |
| | MGCDGPECDKPIQYLGFVFDGKRAVIRSASHSR | | |
| | FLKRMRKAVSLAKQTKRKRDKIRTSKGLETTSL | | |
| | HKKKLYTKYSYLGNRNYISYAHRAAKIMDEDA | | |
| | IKKQVKPLWKRLRQEIESD | | |
| 8028 | SMKEFALNLSALYSAFDAVKENHGCAGADGVT | CAJ74578 | Candidatus |
| | IERYEGNLDLNLRIMRKELTEQTYFPLPLLRILV | | Kuenenia |
| | DKGNGEARALCIPSVRDRIVQAAVLQLIEPVLE | | stuttgartiensis |
| | KEFEECSFAYRKGRSVKQAVYKVREYYEQGYQ | | |
| | WVVDADIDAFFDSVDYSLLLLKFKCYIHDPCIQ | | |
| | NLVGLWLKGEVWDGKTVTTLKKGIPQGSPISPI | | |
| | LANLYLDEFDEELTRNGYKLVRFSDDFIILCKNS | | |
| | GMAKESLKLTKKILEKLLLELDEEQVINFDQGF | | |
| | KFLGVIFVKSMIMVPFDRPKKERKVLFFPKPLDL | | |
| | EVYFKQRKQGKIWQTST | | |
| 8029 | KKYSLTPAMLEVCKEYNFFSDVSGFMPLTSENI | ZP_00813439 | Shewanella |
| | KEIKIGKKFAYSHQDNNKPTHQKLSKIIFENFLS | | putrefaciens |
| | NIPLNQSAIAYVKKKSYFDFIEPHRNNYFFLRIDL | | CN-32 |
| | KDFFHSISEDLLKRTLSDYFSSESLSETIKQSNID | | |
| | AIFTFLTVNLKSDSSNVKFLDKKILPIGFPLSPNL | | |
| | ANIVFRKTDLLLEKLCDMHGVTYTRYADDMLF | | |
| | SSRGIMEKNLLFRKNNNYKKPYIHSDNFLSEIKY | | |
| | LVSIDGFFINHNKTIKSVNTLSLNGYTISGTNFPD | | |
| | JEGKIRLSNKKTKIIEKVIHEININPDDKVTFEKCF | | |
| | KKEFPKPKYEKNRDNFINNLCTIKINQKLLGYRS | | |
| | YLISIIKFNNKFNCISESSEDKYNTLLSKIENVIKK | | |
| | RIK | | |
| 8030 | EHTYYPHHPINSLKALNRALGIDEDEIFHALSNIS | YP_573256 | Chromohalobacter |
| | YKEVPIKKKDGAIRVTYDATSALKVVQKKVTS | | salexigens |
| | NIFHRVNFPHYIHGCIRDTKTPRNIYTNAYPHAG | | DSM3043 |
| | CKQVILCDIKDFFPSIKAKTVFFIFRHCLGFSPNV | | |
| | SQRLTDLCTYNGTLPQGASTSSYIANLAFWDVE | | |
| | PLLVKKLESLGLTYTRFADDITISAKKSISKSLKT | | |
| | QVLHEVRRTIRKRGCSLKKNKTIVLKRSQVIIGK | | |
| | DKETQETTRNPITVTSLSIHHSSVTISKVERRKVR | | |
| | AFVDKLSKTEFNRVSYHEWCRRYSSAMGRVSR | | |
| | LISCGHKEGEPLKQRLKALKDEHKKFHQRSSNV | | |
| | SGRK | | |
| 8031 | HTVHGNFFYKLSNKKRLAKYLRVSLKELLTLQ | YP_797537 | Leptospira |
| | DDSNYKVWSEEGENGKLREIQEPVYKLKSVHS | | borgpetersenii |
| | KIQKSLASIVAPEFLFSGVKGKSNISNASYHKDG | | |
| | NYIVTADIQSFYINCNKEHIFRFFKYTLRTSDDIA | | |
| | RILTELCCYKTFLPTGSPVSQILAYHSYARIFNRI | | |
| | DAFSKANDITFSLYVDDITLSSEKSIHRYILKTIS | | |
| | KLLKSVNLSLKKEKTKFYNKNSYKIVTGCAISP | | |
| | DHILLRPNKIMRKIDNKLCKHEKDLSKLTPKEIE | | |
| | SVLGQVIYLRSITPNSYPQLFKSLSLMKTEEKIK | | |
| | QRPL | | |
| 8032 | DKKAIYIERFLVYAPRKYRVYKIPKRKHGSRVIA | YP_856565 | Aeromonas |
| | QPTAELKKLQRAFINRSKIPVHECAMAYKDGVS | | hydrophila |
| | IKDNAQLHSTNTFFLSMDFENFFNSITPDLLWGV | | ATCC7966 |
| | FNKFGKVISPNEKLWLSKLLFWCPSKKNSNKLI | | |
| | LSVGAPSSPKVSNFCMYFFDEYISTYCQDRNITY | | |
| | SRYADDLSFSTNEKDILFQIPGVVKETLLKLFGR | | |
| | DITINNSKTVFSSKAHNRHVTGITITNEGELSLGR | | |
| | EKKRYIKHLIFRFKNGLLDVSDVSYLRGILSFAF | | |
| | YIEPAFKTSMVKKYTKATIDSIFNGVDDGK | | |
| 8033 | KILKIPKKNGKYRTIYAPDAEEKRALRGIVGILN | GAA02480 | Pelotomaculum |
| | QKCQHVCDPAAVHGFMPLKSPVTNALAHVGR | | thermopropionicum |
| | KYTVSFDLEDFFDTVTPEKASKCLTKEQKELVF | | |
| | VDGAARQGLPTSPAVANLAATDMDRAILKWIE | | |
| | KSGKSVVYTRYADDLAFSFDDPELIPVIQKKVPE | | |
| | IIRRSGFRVNTDKTTVQAAVAGRRIICGVAVDD | | |
| | EGVHPTREVKRRLRAAKHQGNELEAAGLEEWC | | |
| | KLKVPSGKRQKARETTEGLDELRKHWKLRKID | | |
| | MAKAVSRKVIPEKDLGDNCYITNDPAYFMGMS | | |
| | TFTTGWKSCMRMDGGEYRKGVMAWLALPGTS | | |
| | VAVFLSDRTMNIAGVERRRMRARCLVHKLENG | | |
| | QLVYDRLYGNPDDTPVLVKKLEEAGIRPIREFA | | |
| | GKGIYVEGDVPASMAMPYCDNLWEEKINIKSG | | |
| | KRVVRFYV | | |
| 8034 | SITDLALAIGVSPRLITSFIHAPGNHYRHFNIGKR | EAT03589 | Deltaproteobacterium |
| | GGGERVISSPRTFLKVVQYWILDYLLHPLPCHP | | MLMS-1 |
| | NCHSYQKGKSILSNSLPHVGKKYVANIDILNFFP | | |
| | SITERMVFDFLKKNNFGEQLSKSLSRIVTLNNGL | | |
| | PQGAPTSPVISNSFLNKFDEIISEKSLLLDVSFTR | | |
| | YADDITISGDRKENIISLIEISEHYLNSIGLKLNNK | | |
| | KTRIASKGGQQRVTGIVVNKTAQPPRKFRKNIR | | |
| | SMFHHAGMKPELFVDKINVLRGYVSYLQSFPNL | | |
| | YDGNEIKKYKKICATIQANFVQKQ | | |
| 8035 | EWIEYREQFITTAKKASKNSGYIKKNLKYAEKL | NP_603068 | Fusobacterium |
| | YNQKLPIIYNASHFSKLVGYSLQYLYAASNDSS | | nucleatum |
| | KFYREFEIKKKNGGSRKISEPLPSLKEIQKWILEN | | ATCC25586 |
| | ILNKIQKEKVSKYAKAYQKKISIKENVKFHRGQ | | |
| | KKVLSLDITNFFLNIKIDKIYEVFYNLGYSKSLST | | |
| | LFSNLCTLNYSLPQGAPTSPILSNIVMLNFDNEIE | | |
| | KIVLEKRIRYTRYADDMTFSGDFLEKEIIKYVKE | | |
| | NLNKIGLKINNKKTRVRKNWQQQMVTGIIVNE | | |
| | KIQISRKKRDELRQTMYYIEKYGIDSFLKYKGIK | | |
| | NKVYYLSHLKGILEYAYFINKNDKKLFNYIEYL | | |
| | KNNFFKEKSSI | | |
| 8036 | TIEVQRWEDKFEIKPGVWVYVPSVEARKVGGKI | NP_806368 | Salmonella |
| | LQAVRNKWIPPLYFYHLRTGGHLKAARLHLKS | | enterica |
| | DFFAVVDIKQFFQSTSRSRITRDLKSYFTYSQAR | | |
| | EISTFSTVRNLSHSPHKHVLPFGFVQSPILATLCL | | |
| | DKSYFGSLLRRLNKHHDLKLSVFMDDVIISSNN | | |
| | LAQLQAAYDEALVAMRKSGYQANMSKTQAPS | | |
| | SKISVFNLTLSKGVMKVTSQKMSDFLIDFYSSN | | |
| | YEPHRIGVKNYVEAVNPGQAKLFKL | | |
| 8037 | NRWSSRAFKKHNSDKPAAVVETAALYGRKIQT | ZP_01043439 | Idiomarina |
| | SCPELPVIFTLNHLALKSGVPYNNLRSFVDRTIE | | baltica OS145 |
| | RPYRSFTLRKNGLGSNPRKFRVIKVPQQDLKKA | | |
| | QQFINQNILSKMEPHECSVAFSPGSKIYDAASEH | | |
| | CNARWLLKFDIVSFFESITEKSVYRVFRRYNYPA | | |
| | LLSFEMARICTALKARPPINWGGAPPNIRYRTIP | | |
| | GYSNKNLGTLPQGAPTSPMLANLVSYNLDRRL | | |
| | KLIADAYNCHYSRYADDITFSTDSSLSRGEVSRII | | |
| | AMINSTLREYGHTMNKAKTTIAPPGARKFYLG | | |
| | MNIHGDSPQLRKSFKRKLKQHLFFCEKNSVGPE | | |
| | KHSKHLGFVSVIGFKNHLRGLINYANQVDTVFG | | |
| | ENCMKRFQSIDWPL | | |
| 8038 | EKIENEIVNKTYLAINSLEELRNMIGIKSDYFYK | BAB43301 | Staphylococcus |
| | CLYVNDHFYNVIKIPKRKKDEYRELMIPNMALK | | aureus N315 |
| | NIQRWILDNVLYRRQVHKCATGFVPRKSIVNNA | | |
| | IPHVGQKYILKMDIENFFPSITFKQVRKIFSEMGY | | |
| | KFELATALANLCTVNNQLPQGAPTSPYIANIIFY | | |
| | NIDKRIFSYCQKNNLRYTRYADDITISGSNKVSF | | |
| | SKEIIREIVNQYNFRINESKTIMFKPGDRKKVTGI | | |
| | IVNEKISVPKTLIREVRKQIYFVNKFGLEEHLIRN | | |
| | NYSLDYEQQFIMSIYGKISFIKMIDFKKGVSLQK | | |
| | KFNEVLGNIESSNMYRDNIDFDDIELHWIN | | |
| 8039 | TARLDPFVPAASPQAVPTPELTAPSSDAAAKRE | P23072 | Myxococcus |
| | ARRLAHEALLVRAKAIDEAGGADDWVQAQLV | | xanthus |
| | SKGLAVEDLDESSASEKDKKAWKEKKKAEATE | | |
| | RRALKRQAHEAWKATHVGHLGAGVHWAEDR | | |
| | LADAFDVPHREERARANGLTELDSAEALAKAL | | |
| | GLSVSKLRWFAFHREVDTATHYVSWTIPKRDG | | |
| | SKRTITSPKPELKAAQRWVLSNVVERLPVHGAA | | |
| | HGFVAGRSILTNALAHQGADVVVKVDLKDFFP | | |
| | SVTWRRVKGLLRKGGLREGTSTLLSLLSTEAPR | | |
| | EAVQFRGKLLHVAKGPRALPQGAPTSPGITNAL | | |
| | CLKLDKRLSALAKRLGFTYTRYADDLTFSWTK | | |
| | AKQPKPRRTQRPPVAVLLSRVQEVVEAEGFRV | | |
| | HPDKTRVARKGTRQRVTGLVVNAAGKDAPAA | | |
| | RVPRDVVRQLRAAIHNRKKGKPGREGESLEQL | | |
| | KGMAAFIHMTDPAKGRAFLAQLTELESTASAAP | | |
| | QAE | | |
| 8040 | YSQNLTTIPLATESNLERLETDNLALLRSHGLAE | ZP_00112324 | Nostoc |
| | YNTAEEIAFAMVISLEKLHFLTTSTSLTRHYLPF | | punctiforme |
| | KISKKTGGKRIISAPKPELKAAQRWILENILEKLE | | PCC73102 |
| | VHNAAHGFCKNRSIVTNAKPHVGANVIVNIDLQ | | |
| | NFFQSISYKRIKELFSGFGYSESTATIFGLICTTAE | | |
| | IAINGQINHTASENRHLPQGSPASPAISNLVCRNL | | |
| | DIRLAAIAENLGFCYTRYADDLTFSTSEDASSKI | | |
| | SNLIKNTKFIIHGENFTVNDNKTKISSKSVQQEV | | |
| | TGVIVNTQLNISKKTLKAFRATLYQIEQEGLSGK | | |
| | SWGKSTNLIAAITGFANYVAMINPDKGAEFKSS | | |
| | VERIKQKYGGSQTDEVRF | | |
| 8041 | AGMPGFVSAWRSEQPPRVVRVLTRPPFQRPPPP | ZP_01511780 | Burkholderia |
| | WLHDVALPQLPTLGDLAAWLDIEPGDLGWFAD | | phytofirmans |
| | RWRVPTRGAATPLHHYAYKAIEKRDGRCRIIEIP | | |
| | KPRLRALQRKVLSGLLDRIPAHESVHGFRHGRN | | |
| | IVTFAAPHVGKAVVMRFDLTDFFASVHAGRVY | | |
| | SAFYALGYPQAVARALTALCTNRIPSGRLLAPD | | |
| | VRERIDWRERQRYRNRHLPQGAPTSPALANLC | | |
| | AFRLDLRLAGLARSVGATYTRYADDLAFSGDE | | |
| | ELARMADRLCIRVAAIALEEGFGVNLRKTRVM | | |
| | RRSARQHLAGVVVNSHANVARPEFDALKAVLT | | |
| | NCVRHGWRSQNRDDLADFRAHLAGRVAHVA | | |
| | MVNAVRGARLRAVFERIEWEEEKPLDA | | |
| 8042 | ELLLGIVIVVTCWMVVRIIRSSKNQEGYKRWRA | BAD47792 | Bacteroides |
| | GNYASENPYAKEKASGPLSQGLFSKRVRTTGAR | | fragilis YCH46 |
| | RFDDGAIRWCANLLATEESRLREVLDYIPRQYT | | |
| | CFHVRKRSGGFRYISAPAGDFRSMQQTIYHRILL | | |
| | LANIHPAVTGFCPGKSVSDNARVHLGRKNVLK | | |
| | VDLHDFFPSIRSPRVRAAFREMGYSRPIAKVLAE | | |
| | LCCLRCCLPQGAPTSPALSNIIAYPMDKKMMAL | | |
| | AGEYGLVYTRYADDLTFSGDYLPKDEVLVRIH | | |
| | RIIREEGFTMNVKKTRFLSEHKRKIITGVSVSSG | | |
| | KKMTLPKVKKREIRKNVHYVLTKGLVGHQEHI | | |
| | GSTDPVYLKRLLGSLCYWRSIEPDNRYVSDSITA | | |
| | LKRLM | | |
| 8043 | KTLKNIEDRKDLADYLNIPIKRLTYILYIKRTENL | ZP_00231674 | Listeria |
| | YYSFEIPKKSGGVRNIDAPKSELKALQKKLAAS | | monocytogenes |
| | LTKYQEILQKSKRKAPNISHGFEKGKSIISNAKIH | | 4bH7858 |
| | RNKKIVYNLDLENFFESFHFGRVRGFFEKNKDF | | |
| | ELSTEVATIIAQLSCFNGALPQGAPSSPIITNFICRI | | |
| | MDMRILKLAKNYKLDYTRYADDLTFSTNDKKF | | |
| | IDQIDYFLHKLTKEIEKAGFKLNKNKTNLNFKDS | | |
| | RQLVTGLVVNKKINVDRRYYKETRAMAHRLY | | |
| | KTGEFQIDDKNGTLNQLEGRFSFINQVQRYNNV | | |
| | IDSSKHDFNNLNAFEKQYQAFLFYKYFYANNKP | | |
| | HIVTEGKTDINYIKAALKKHHLEFPNLIVKKEDG | | |
| | EFDFRVAFLKRTNRLAYFLNIKKDGADTMKNIC | | |
| | KYFFDIENNEVPNYLKTFKILTKQIASNPTILIFD | | |
| | NEISNNVKPVSKIIKYIKLKEDSRVMLTEKSYLN | | |
| | LEDSLYLLMNPLVKNKKECEIEDLFDEATLNHEI | | |
| | NGKKFSREKNMDLNKYYSKERFSNFIYNEYREI | | |
| | DFSNFKPMLENLNFIIENYKNEK | | |
| 8044 | DHFSSVVDNYILQTNKDGHYCWRPFELIHPAIY | YP_670592 | Escherichia coli |
| | VHLVHKITEDESWQLLLERFGEFQSNTKIVCASL | | 536 |
| | PRESEEDGVSDKAKAVSGWWRDVEQESINKSL | | |
| | QFKYLFSTDIANFYPSIYTHSIPWAIYTKEDAKA | | |
| | ARGAGRNLGDQIDYALRQMRWGQTNGIPQGSA | | |
| | LMDFIAEIVLGYADELLGQKLESQNINDYHIIRY | | |
| | RDDYRIFTNSKEDAEAIARHLTVILQGLGLQLN | | |
| | ASKTSLTEDLVLGSMKPDKQEALMVFGRSVNA | | |
| | TTIQKTLLKLVIFSRKYKNSGQLEAYLAKINKRL | | |
| | ERMSSIKEEVRAIVSIISDLMINNPRTFSSCALVL | | |
| | SNVLKFVDNDVEKLELLKQIKDKFKPILGTGILD | | |
| | IWLQRISYHINRDIEYKETLCSIVSGVHDRPHEH | | |
| | VWNSEWISDNNFKNSIMATSFVDNDKLQACEPI | | |
| | IPEEEVTLFPYDSDVDEEDLE | | |
| 8045 | KDLTAKDLIGKGYFPKEIPKGFSTNSLAEKFSNL | ZP_01171347 | Bacillus |
| | DFSTFTKKERGKWYKTSNISIPKFAHSRRILNVP | | NRRLB-14911 |
| | APFPQMRLSQLLVKNTEELNEYYSQSKLSLTRPI | | |
| | VKEESDRAVERKYHFSKIIERRIESINDKKYILKT | | |
| | DISRYFPTIYTHSIPWALHTKEVAKQTRGDSLLG | | |
| | NTIDEYVRNIQDGQTMGLPVGPDTSLIISEVIGT | | |
| | AIDIKLQEAHPNIIGSRYTDDFEFYFKTQSEAEK | | |
| | VLNTIQEIVRHFELDINPVKTEIISSPNLLEPIWLS | | |
| | NLKLYQFRSSATAQKNDIKTFFSTAFYYQNQSP | | |
| | YEGVLKYCLKKIKNLKIKEDNWSLFEALILHIM | | |
| | LIDPTTLPLIENILFGYKEIGYPINEQKIKDTIAEIF | | |
| | ASNIAVGNNYEIMWALSLSNKLQLKISNESSKL | | |
| | LFNLEDSFSNILTMEAYTNGYIEGGYEPEYFKTL | | |
| | LNENELYGRNWLFAYEMSVKGWLKPHQQKEY | | |
| | VKKDTFYNQLFESKVEFYHNDRKAEIKNDDWL | | |
| | TALLNDDDIEELFIQNASSKKPYLRGGSGGADY | | |
| 8046 | KASKLRPRDFLQCLLSTAYLPEELPPTVTSREYS | NP_766843 | Bradyrhizobium |
| | EFCRRNYALVRAEKDKLIKLATSYDTYSAPRNV | | diazoefficiens |
| | PGRRALAVVHPLAQLGVSLLITERRAEIRSLLKK | | USDA110 |
| | SGTSLYDVSEAAAQAKAFAGLDFQKRRTLAAK | | |
| | LHSEKPFILQADISRFFYTAYTHSIPWAVLGKEK | | |
| | AKELLRTNRKKLNAHWSNKIDEALQSCQSRETF | | |
| | GIPVGPDTSRVLAELLLSGVETDKSLSKYLQPTN | | |
| | AFRLLDDFSIGFDNEADARQALRAIRQVLWRYN | | |
| | LQLNEEKTKIITSPLIFREKWKLDFDKAPLSQIDP | | |
| | QQQLRDIEYLVDLALNACFESRGNSGSMGLPPP | | |
| | KSGDSSRRHLSHLA | | |
| 8047 | APDKDFVLIALLKYNYFPAHKKEKEELPPIFSTK | CAJ75424 | Candidatus |
| | QFTKKIAQKLSHLRSRKDGYDQISYKITRYNNIP | | Kuenenia |
| | RVLSIPHPKPYADIVFCLSENWDNLAYICNNEVS | | stuttgartiensis |
| | LIRPRQHKDGRIIIMNYEGSHEKIERSLKKSFGH | | |
| | KFCIETDITNCFPSIYSHAIPWALIGLKEAKSRKR | | |
| | YKNEWFNKIDARQRMLKRNETQGVPIGPASSNI | | |
| | ITEIILAKVDEVMSKDFNYIRFIDDYTCYCKKYE | | |
| | DAEEFARRLSQELSKYNLTLNLKKTHIHQLPKP | | |
| | TNDDWIIDLKSRISGDSKKITHYQAVNYIDYAVS | | |
| | LNKKIPDGSILKYAFKSIRGRLNVKDERFCLNYI | | |
| | LLLAPHYPILIPIINKMLHNASKKDKFVYEKELK | | |
| | YILDESIVNHRSDGMCWTLYYLLKNKVTLSPEI | | |
| | AKHIIATKDCMAILMLYLFKKFDTEINGFANGL | | |
| | DKTDLYGLDNYWLLLYQLFYDNKIKNPYKDEE | | |
| | TFKILKDNNVNFIQSK | | |
| 8048 | SNIDDRMREVRAVLTETLPFELPLGFTNENLFLS | YP_682736 | Roseobacter |
| | ELRLDQMTGVQQNYLNRLRRPHNNYTKPYLYS | | denitrificans |
| | INRSRRSKNTLGLIHPAVQLRIATFYSEFEQTIIQ | | OCh114 |
| | ACGRSTFSIRHPYEALRIYSKDSAKDVRKRWKL | | |
| | ALPGENVGHAIKTSYTSSYFAYRKYLLLDKFFSS | | |
| | NEIIRLEGKYSRLRMLDVSKCFFNIYTHSISWSL | | |
| | KDKDFSKKNAKNYSFEQQFDTLMQHSNYNETA | | |
| | GILVGPEVSRIFAEIILQRVDVELERAVSKRLKLE | | |
| | CGRDYDIRRYVDDFHLFANDEDVLDKVEGVLA | | |
| | EILETYKLFLNTGKSEEVERPFVTGISRLKFEVSG | | |
| | ICAKLYDELTVDLSNNEESSAEARETLRKARVS | | |
| | LDALRHIGGTERALLPSAMSEVFTTLSRIVRSLN | | |
| | KMTELDLSEAQSEDLIARVKTVVRVLFYLSAID | | |
| | FRVPPIIRLSLILKEVVRLSKKLAQPYRETITGYL | | |
| | VYELSELMATHYVEEAEAVGLEVANTFVLGLV | | |
| | VEPALFAMQESSAKFLHNVLTGKHKCYFSVLC | | |
| | ALHALNSVENIKEDEKNAFVDGLINRILSNDFEI | | |
| | EVSCEEYLIFCDALSCPAIDRDVRWQTFQDKLG | | |
| | GQGLSKAAFDELALCFRHINWDANGPGFELVQ | | |
| | RRLPPVYFSG | | |
| 8049 | PMLKLAERSLDWALLHIEKYGDTDIFPVPFEFEA | YP_519037 | Desulfitobacterium |
| | IRYQWEQSMRSWLRSQDILQWTPRPYRRCLTPK | | hafniense Y51 |
| | HRYGFRVATQLDPLETIVFTSLVYEIGKDIESARI | | |
| | PKEEKIAFSHRFAAKPDGRMYDSEYSWDLFQD | | |
| | HCGELVESNDYRYVVIADIADFYPRIYFHPLENA | | |
| | LSECTRKKNHIKAITSMIKNWNFSVSYGIPVGSA | | |
| | ASRLLAELVIDDVDRGLLSEGVKHCRYVDDYRI | | |
| | FCKNEREAHEHLALLANTLFENHGLTLQQHKT | | |
| | RILPIEEFYNHYLQRENSQELNSLSAKFYHILDSL | | |
| | GIENRYEDIDYDDLAADVQAQIDNLNLMGILKE | | |
| | QVLETEAIDIPLVRFVLKRLKQIDSEESVDFVLD | | |
| | NINQLYPVFKEVITYITSLRSLNTADKHEIGKKLI | | |
| | QLLEDSIVSHLEYHRLWVFDTFTKDREWDNEG | | |
| | KFVNLYNSYHDEFSQRKLILALGRAQQHSWFKS | | |
| | RKRTVNQMSPWLKRAFLAAASCLPGDEAEHW | | |
| | YKSLQGSLDPLELTITKWVQANPF | | |
| 8050 | QSNDEVDYIVDPAFWLNGQALGFPVNFELVLK | ZP_01039369 | Erythrobacter |
| | HLRQDMRDDWYYDCLQYDDLFKDPSEAKRIIIS | | NAP1 |
| | LLQEWNGEYRGTRSVVRNIPKQGYGERYGLET | | |
| | DFFDRFVYQAICSFLIPFYDPLLGHRVLSYRYEP | | |
| | TPIKAKYLFKNKIDRWFTFEGVTLTFRKSGLYLL | | |
| | ITDLSNFFENVSREQIIKALEQAVPNLLATGPQK | | |
| | LHVRNAIATLDRLLGQWTYSGDHGLPQNRDAS | | |
| | AFLSNILLSNVDRKMAEKGYDYYRYVDDIRIIT | | |
| | DSETHARRGLQDLIRELRTVGLNINAKKTEILAP | | |
| | DVSDEKVAKYFPSQNSSTIAINQMWQSRSRRVV | | |
| | TRSVTYIFEILSKCIAEWDTQSRTFRFAVNRVAK | | |
| | LVDSGLFDVGDALSVELLDTLSQSLSEHAVSTD | | |
| | QYCRLIATLDHGGRCLPSLEAFLLAEDGAIHDW | | |
| | QNYNIWMLLAVRQHRSDDLVALAERKLQADM | | |
| | KSGEAAAILIWLRCVDEKALIARCLEEFANLPFQ | | |
| | NARYLLISASVLEEEVLRPLYGHVPTGLRGTGH | | |
| | RTQRHCNEDGLPFAPRENTDLLNLIDEISGYD | | |
| 8051 | LTDRFHQIRKEELENLFSKKNISDVWRKIVRDQL | ZP_01202165 | Flavobacteria |
| | RRVDILDTEDYYDFNYNIDERALLLRTVLLNGN | | bacterium |
| | YQPSQPLIYRIEKKFGICRHLVIPHPLDALVLQVI | | BBFL7 |
| | TENISQQILNNQPSKNSYYSRDKHNLRKPHEIDE | | |
| | YGYHWRRLWKKMQKQIYQFKEEKELIIVTDLS | | |
| | NYYDSIYIPELRKVISGFIDKKESVLDILFKIIERIS | | |
| | WLPDYLPYTGRGLPTTNLEGVRLLAHSFVFEID | | |
| | EVLKSKSNESFTRWMDDIIIGVNSRTEAVNVLSS | | |
| | TSDMLKSRGLALNLKKTNIYSSKEAEFHFQIEEN | | |
| | QYLDSIDFDYHIEHGIRKIGSELSKRFTKHLKNN | | |
| | VSAKYSEKITKRYITSFAKLQSKQLLKKVPVLEN | | |
| | EIPGVRGNLLYYLSSLGFSKRTSEIVLNILKELKL | | |
| | HDDISLFNVCKLVTDWEIPITKESDAFIKAFIKQV | | |
| | KSFSIQRKQPFDFYCLIWVKTKYEHPDELLKFIN | | |
| | DYDYIWKTHPFLRRQVTSIMGRLLNYRKDEITK | | |
| | FLQSQIATSEPQVVSVANSILEFSKIKTVEQKVK | | |
| | MYLFPQSKYRTYPYQKFLVLCSFLNSEVYSKNE | | |
| | DIKKKVLENISDPYYLKWLDYQYNIK | | |
| 8052 | QVTLLREERMRSFLSQVCDQLNMRWAWEKVK | NP_882842 | Bordetella |
| | RASVPGDIWIDEADLAHFEVHLGHELRGLGDDL | | parapertussis |
| | LSGRFRMSPIRPMVFPKNPDGDGNPRVRQYFHF | | 12822 |
| | TVRDQAWVAVVNVLGRYIDEQMPVWSYGNRL | | |
| | FRSAWIEEDIHGNKIRKIGPYRHSSGRIYRLFQQS | | |
| | WPLFRRHIALAVSAAAHGYSKVDSLDDDEREE | | |
| | LGFQRRMHRANQCPFVLADYWTNLPTGPNESD | | |
| | VYWASVDLEKFYPSIPLTACVDAISQFVPAELRP | | |
| | EVQRLLKTLTQLPLNLDGWTDAELKHIELDESR | | |
| | KTFHKIPTGLMVSGFLANAALLPVDQEVQKTLP | | |
| | RGRVAHFRYVDDHVILTKTFDDLITWIDHYKDV | | |
| | IDNLGSGASINPAKTEPKALGELLGTSDTSKRFA | | |
| | GSDLWNRAQKECRLDPEFPTPLMTKTIALVSAI | | |
| | GKTDFTALEDNELSILPQQL | | |
| 8053 | LLPTLRGHATFGVDVRHTQKITGHGMTNKTDK | YP_373506 | Burkholderia lata |
| | YAALAPRIEYLSDVVVLSQAWKKTHTYIRHHN | | |
| | WYADTLELDCSAVNLDGELSQWSAELRDGTYT | | |
| | PKAARLVPAPKSDPWVFGDAEINGWAPVSSSEH | | |
| | FLRPLAHVGIREQTIATAAMLCLADCVESAQGD | | |
| | TSLDALDAQKAGVFSYGNRLFCSWTDQGARAR | | |
| | FSWGNSNVYSRYFQDYQSFVERPLLIAQSAVLS | | |
| | GQDALTLFVIKLDLSAFYDNINIEGLVEKLTELY | | |
| | WRYSETIAPTAKTSSARFWATLAKSLSIGWQVE | | |
| | DAKWAPYLKGQKLPSGLPQGLVSSGFFANAYL | | |
| | VDFDEAVGESIGRSFNRRGVKFRLHDYCRYVD | | |
| | DVRLVVSCDKQVPSEEELGLALTEWVQARLDS | | |
| | KANDVEFEERLVVNEQKTEVQPFASLGGESGTA | | |
| | ARMKSLQSQLSGPFDIAALQHVEAGLNGLLAQ | | |
| | AELGTAAKQKVDGGRNLPPLASVVRPKREVRD | | |
| | DTLTRFAAYRLTKALKLRRKMTDLTQDEEAGL | | |
| | SRNILLHDLEVAARRLVAAWSLNPGLAQVLTY | | |
| | ALDLFPCPELLKTITDALLTKVLGTQEDAYSTGT | | |
| | ALYTLAQLFRAGASQTGKYWESDGSLQVGDVE | | |
| | RYRLELGQLARMLIDEGVLPWYVRQQALLLLA | | |
| | SLSQVITLDTSFDELPYHRSLHEFIGKRVDEGLP | | |
| | HIEETIAVSLVGHQLLRDDAHYAMWFAALSRQ | | |
| | STRKDRLIALELLAQNQPHLLRVIAASRSNRQLA | | |
| | AEPAFQSIVRYFSSFKEPEDECALVDGEWLSFGD | | |
| | IVKMRDTPFHEENALLQLAFALADAVSRTDELP | | |
| | EQWTPQTIQVRCEDWALLSDPRGMPRLSIRIGPT | | |
| | RGRRDPRYRTPEWCNSEDAILYAIGRVIRCAAT | | |
| | GELDFTARQWLLREENIGWYRGISSTWKKRQIG | | |
| | MLNTSVAMAGTTAAITPWFSELLLRLLRWPGL | | |
| | QAQLETSSSVGVVTDAAMLRDLVHERLKAQAA | | |
| | LFGKSSNLPIYVYPVDWPIDESRLLRVCVIQGLL | | |
| | PTTKDFDGGLASLHKEGFRARQRNHTASILYLA | | |
| | YQQLQARDSVLGKDHKPYVDLVVLPEYSIHLD | | |
| | DQDLMRAFSDATGAMIFYGLCGATHPVTSEPIN | | |
| | AARWLVPQRRNGGRSWVEVDQGKKYPTTEEE | | |
| | TLGVKPWRPHQVVIELSSGGAGKFRISGAICYD | | |
| | ATDISLPADLRDVSHMFIVSAMNKDVKTFDSM | | |
| | VGMLRYHMYQHILVANAGEFGGSTAQAPYEQE | | |
| | HKRLISHNHGSDQISVSVFDVDINHFGPNLQATK | | |
| | VTLDPSGKKKRIGKTPPAGLMRDSVQ | | |
| 8054 | RPLAHVSIKDQTIFTALMMLLANHVETEQGDTS | AAR05370 | Aeromonas |
| | TSFYDVHAKGLINYGNRLHCKYSDNNAIYSWG | | hydrophila |
| | NSNTYSKFFTDYQRFLERPIHFGREAKRVKTSKE | | |
| | EIYEIHLDFSKFYDSVNRGILTKKISALVEKITGA | | |
| | ETDECISHVLSKFRNWKWTEKSKELYTGVCKN | | |
| | KHIETLKDNRGIPQGLVAGGFLANIYMLDFDKA | | |
| | ISKLIGQYLDDNETILLIDACRYVDDLRLIIKADK | | |
| | NEVSENKIREVITTRFKSYYDELELILQPQKTKV | | |
| | KKFSSKDGAISSKLAHIQNKISGPMPLHELDEQL | | |
| | GHLEGADRTNRQP | | |
| 8055 | KRVGLLFERVVAFENLLHATRQAARGKKSQLR | ZP_00592520 | Prosthecochloris |
| | VAHFLFHQEKECLRLQTELKQGIWQPSGFRVFEI | | aestuarii |
| | REPKPRRISAADFQDRVVQHALCNILGPLCERRL | | DSM271 |
| | IFDTWACRRGKGSHLAMKRAQAFSRRFPYFLK | | |
| | CDIRRYFDSVDHTILKRLLWRLIKDKPVLNLLD | | |
| | RIIDHPLPGALPGKGLPIGNLTSQHFANLYLGEL | | |
| | DHQLKDRMGVKAYLRYMDDMLIFADDKSRLH | | |
| | ELVTGIEDFVKQHLQLSLRPSATLVAPVSEGVPF | | |
| | LGFRIFPGLVRVNGQALRRFRHRLRLHEKAYQT | | |
| | GKMDVESLTASVQSMIAHLQHADTHRLRQSLL | | |
| | SSSCALG | | |
| 8056 | FFLRIVMKRIGNLYESVVSGESLWEGYLGAKKS | AAZ18310 | Psychrobacter |
| | KGGRRGCFQFEKSLGRELNELQEELANNTYKPR | | arcticus 273-4 |
| | PYFKFIVYEPKKREIYAPAFRDCVVQYAIYLRV | | Bacteroides |
| | MPIFDKTFIDQSFACRTGLGTHKAAEYAQDALR | | |
| | RAGPNTYTLQLDIKKFFYSIDRPTLRKLLERKIK | | |
| | DKRLVDLMMLFADYPEPKGIPIGNLLSQMFALI | | |
| | YMNPVDHYATRVLKPAAGYCRYVDDFLLFGLT | | |
| | RAQALTYRKLLTDFVEQKLKLTLSRSTIANTKR | | |
| | GANFCGYRTWRSGRFIRKHSLYKTRKAVRANK | | |
| | LESVISHLAHASKTHSLQHLLNYAEQQNHGLYC | | |
| | QLPKIYHTRHHQAVERSGRINGVMRNRCSNVC | | |
| | IDNKLFTFQQIYEAYRKLKSYIYYDNTSLFIRKEF | | |
| | SSFESSILAGENFEDNFKKKMKSLYDILNSDNYQ | | |
| | TDLDKLVSKIGYKLVPKSIKKKESTIVTNIPHTG | | |
| | KIEVESYNILIDAPIEIHIISVLWLIVAGKELCKYV | | |
| | NENNYAYKLLLLDESYLPMTDIKIETNKENYVV | | |
| | TGLQLYEPYFIGYQNWRDNALNSATKLLDDNK | | |
| | DATILSLDIQRYFYSVRIDLDSIKNRCSHSNKQIE | | |
| | KCFHLLQIINKTYTSKINKLLDIPLTNDELNAGY | | |
| | TILPIGLLSSGLLGNLYLEDFDKTIKEELNPAYYG | | |
| | RYVDDILFVFSDRKVKLEVNNPIHDFIDRYFIKK | | |
| 8057 | NILETILDENNITYLLPVGSHKLKIQSEKVILEHF | YP_212908 | fragilis |
| | NHKESRAAINIFKKNLDKNRSEFRFLPYEENIDN | | NCTC9343 |
| | EFDNEAFSMHYSDSINKLRSIKEFKEDKYGASKF | | |
| | LAHKIFLSKISPNEKDYNRKYFFQSSKQILTFFKG | | |
| | STALSLYTLWEKVATYFVINNESKCLIIFYNQVL | | |
| | NTINNIKTVNGENKIKEDLKEFLFISIAMPISMRM | | |
| | NIKIDNNNDDVVIHKLADDIRKTNMFRQNLLGI | | |
| | SCINYTDYIDHITNDLFHINIKNIKDLKIQINIAKFI | | |
| | SPRFVHYHEFNILNIYQVFSSINKESDIRLFDKIQ | | |
| | DIAFNQYKEFNYDWRFLYSNTDPIYPKDFFTLT | | |
| | QSENSNCKNINILEDNEVECNKKIGLANIEVSEN | | |
| | DILSAIKMIPNISKERRKRIFEIMNYSHKKHVDLV | | |
| | VLPEVSVPFEWIDFFAEQSKNNNIAFIIGLEHVVS | | |
| | SYNFAYNFTATILPIKQKEFTTCLVRIRLKNYYS | | |
| | HSEKELLKGYRLINPSEIKPELKLYDLFHWRKSY | | |
| | FSVYNCFELANISDRALFKSKLDFIVATEYNKDI | | |
| | NYFSDIAGSWVRDLHCFFVQANSSQYGDSRIVQ | | |
| | PAKSDFKNMISVKGGKHPVVLIDELQIDKLRDF | | |
| | QNKEYNLQKELIDKEKTHLKPTPPDFNKDNVLK | | |
| | RIKDEPI | | |
| 8058 | REQSFDKFSLSKRIKQSDFYKCKNLVDEKVFDQ | YP_049163 | Pectobacterium |
| | VIEESYQLAHGLTAPVISKTISKGKEVYYVDRLS | | atrosepticum |
| | YKLILRKLQGNIRNKIETDKLQRNEIVRNLVSYL | | SCRI1043 |
| | QEGVKSKVICIDLKSFYESIDIDSLLSETAKIGSLS | | |
| | YHSKKLIEVVLDEHRSIGGKGVPRGLELSSLLAD | | |
| | LYLQEFDEWIKRIDGVFLYKRFVDDILIMTDHK | | |
| | VDEQSILTSIKNKLPANLCINNLKTQIIEIKKRTH | | |
| | SPNDVEGKLAATIDYLGYKIKVIDTHIPPAANGA | | |
| | SSEGKANSVYRKVVIGVSDKKLNKIKTKLCKAF | | |
| | YNYELNRDFTLLLDRIIFLSTNRLLINKDKNRKM | | |
| | PTGIFYNYPLVNDDNESLKVIDFYIRALILGSGC | | |
| | RLSKKLNGSLNNGQVKTLLKISFAKGFSNKIHK | | |
| | KYSLNRLKEITRIWK | | |
| 8059 | VGRHEKNSVLEISFKYAPRGVELVKARSEGAAP | CAE73057 | Caenorhabditis |
| | LPTEPRGQRESARPIAYIKARTTAVRRVTLSVVH | | briggsae |
| | RYGRMHTLATKKLRKISCPPTFKKETKFLKSSEI | | |
| | EKFKNSQKKVFDVEALYTNIDNRAAYQAVVDK | | |
| | LKKNASVIDWYGDSFTHIKMLLKSCLEFNGFQF | | |
| | DGRIYEQKRGLAMGSRLAPVLAVLYMDIIETPS | | |
| | KVHPIILFRSYIDDYIVVAESQDTLDNIFTCLNSQ | | |
| | ATHIRLTREAPKMDWLSFLNCELRFKNKVFSSR | | |
| | WYRKPSNKNLLIRMDSGHPKQQKINTISTTQKT | | |
| | ATENSTIDQRSYSRNLANEGNFDGKKNRLSNAK | | |
| | KSENFRSSLQNRIDFV | | |
| 8060 | DVEIQFENLYAQTAELVSSSKDNVESFKSTLVD | CAJ00247 | Schistosoma |
| | CCFRYLNHGHSSKGILTNKHKEALRKLKTNDNL | | mansoni |
| | LITKPDKGYGIVLMDKNNYINKMKAFLNDQSK | | |
| | FQKLVVKNDLADKIEKQIIDSLKQIKQQGFISEK | | |
| | VFEMLKSIGTRTPRLYGLPKIHKSGLPLRPVLDM | | |
| | NNSAYHTIAKWLMQILKPLHKEIVKHSVKDSFE | | |
| | FVNNIKNLSLKNKFMISLDVTSLFTNIPLLETVDF | | |
| | ICNELTERHTETVIPVTAIKQLILRCTMNVQFRF | | |
| | DNEYYRQLDGVAMGSPLGPILADIFLAKLENGP | | |
| | LKDTISHLTSYCRYIDDTFIVLEKEHEKENILNIF | | |
| | NNIHPSITFTLEEEQNGSISFLDVQLTRRIDGTLK | | |
| | RGLHRKSTVGQYTHFYRAVSIK | | |
| 8061 | RSELIEIMNQCRAFRLTMDLKRYYLTKPNGKYR | AAD12231 | Fusarium |
| | PIGSPTLGSKVISKALTDIWTTIADKRRGVMQHA | | oxysporum |
| | FRPKLGVWSAAFAVCQKLRSRKPSDVIIEFDLK | | |
| | GFFNTIKRNSVQEAANRFSLLLGNCVRHIIDNTR | | |
| | YVFEELKPETELHIINDYTHHKYKRAIPIYRTGV | | |
| | PQGLPLSPVAATIALENEVNMPEMVMYADDGIL | | |
| | IGGKEKFAEFVKKAIRVGAEVAPEKTREVTKEF | | |
| | KFLGLTFNLEKETVSNGDSYRFWNDKDL | | |
| 8062 | DNIHTAKHLISPHCYLASIDLQDAYYSIPVDPNS | XP_0011926 | Strongylocentrotus |
| | RKYLRFMWQGERWQFAALTNGLSTAPRLFTKL | 93 | purpuratus |
| | LKPVFAELRQAGHTVIGYLDDTINIGETKEKLKE | | |
| | SVMRQHFENRGLSRRTVDIITASWRASTCKQYQ | | |
| | VYITQWRRFCHSRNTSYLQAEVETVLEFLSSLF | | |
| | HDRNLSYRNDNYPSRLQEARVPLLPRSTCTRQN | | |
| | VYGNKLTPQMLCAGYLRGGIDSCDGDSGGPLV | | |
| | CENSNSVWKVVGVTSWGYGCAQPNAPGVYAV | | |
| | VT | | |
| 8063 | SPSRWLIRTIRLGYAIQFAKRPPKFTGVYFSRVN | XP_689703 | Danio rerio |
| | PLSAPVLREEIAALLAKGAIEPVPPAEMESGFYS | | |
| | PYFIVPKKSGGSRPILDLRVLNRCLHKLPFRMLT | | |
| | QRRILQCVRPRDWFAAIDLKDAYFHVSILPRHR | | |
| | QFLRFAFEGRAWQYKVLPFGLSLSPRVFTKLAE | | |
| | GALAPLRLAGIRILSYLDDWLILAHSREQLIMHR | | |
| | DEVLRHLRLLGLQVNREKSKLAPVQRISFLGME | | |
| | LDSITMRLLGHMASAAAVTPLGLLHMRPLQHW | | |
| | LHDRHRVSVTALCRRALSPWNDPSFLQAGVPL | | |
| | GQASSHVVVSTDASNTGWGAVCRGHAAAGLW | | |
| | KGAQLHWHINRLELLAVFLALHRFLPVLERQH | | |
| | VLVRTDSTAAAAYINRMGGMRSRRMSQLARRL | | |
| | LLWSHPRLKSLRAIHVPGTLNRAADALSRQLLR | | |
| | PGEWRLHPESVQLIWARFGEAQIDLFASPENAH | | |
| | CQLFFSLTEGSLGTDALAHSWPRGMRKYAFPPV | | |
| | SLLTQFLCKVREDEEQVLLVAPLWPNRTWISEL | | |
| | SLLATALPWRIPLREDLLSQGQGTIWHPRPDLW | | |
| | NLHLPLKKQTVTGSIIAESLKGYML | | |
| 8064 | LPPTGALSQTLQSLTDSKIQEVEKLRGLYESQKT | XP_001217723 | Aspergillus |
| | SILHEADQVTNHQERVARILVGIKRYYPNEYHD | | terreus NIH2624 |
| | PEVRNIEQLLDQARYDSSIPPETLQKFESQLRAR | | |
| | LETKSRRLGLADLYCRLLTEWMQPPTDPEKGK | | |
| | EVATIEDDFLLVEGKQKQKLKELCDQFESVVFE | | |
| | PRETNADEIRGFLDGLFATEESAKALEELRARIH | | |
| | LQCITFWEEEEPFNPDALAMCIRGLLTEDLLSEE | | |
| | KQDTLKYILENKVALREISDVLNMRYADLGNW | | |
| | DWRAGKDGIPVLPRQQVNGKYRIWMDEDVLQ | | |
| | AVFTQYIFIRLCNMVKETLTDFIGDGRVWDWG | | |
| | RSREMTERDKLRWKYYFNLSSPASFGVDAVRK | | |
| | QEFLERHFLYQIPSTQTTLQERGGAYDDDDGDE | | |
| | GSYAAPSEVPKNIKQQLLRKIATETLIQRQVNGR | | |
| | AAVVQSDLQWYATALPHSTIFAVVKYLGFPEK | | |
| | WIRFFEKYLKTPLNLIRSFEDSQSGPRIRHRGVP | | |
| | MSHASEKFLGELVLFFMDVTVNRKTGMLLYRM | | |
| | HDDLWFCGEPEQCVKTWEVLQKYARITGLDEN | | |
| | YSKTGSVYLADIVDEAVVSKLPQGPVKFGFLIL | | |
| | DPKSGSWVIDHSQVEAHIQQLKKQLDHCDSIIS | | |
| | WIRTWNSCIGRFFRSTFGEPAFCFGRPHVDAILA | | |
| | TYAKLQNTLFDDQRQCGALRVTEFLRQRIKSHY | | |
| | GEFDIPDSFFFLPEELGGLGLRNPFVPIMLVRGNI | | |
| | ENSPIDLCDKFKKEEIEDYVAAKKAFEDLHERA | | |
| | RLRRLDYINREADSRLGQIIKTSEMNHFMSFEEY | | |
| | TRFRESKSTRLRSCYEELMRVPERMSLFSTQIVR | | |
| | DELHRTGRSRLGHLDLETKWLLNLYADELLAN | | |
| | FGGFDLVDKKFLPVGVLNMVKGKKVKWQMVL | | |
| 8065 | AASSLSTLQHVTLQKLNKLDSQRQQFESDKKSI | EAT92517 | Parastagono |
| | LEQVSSVPDHRSKVEALLDGFELHGIAPKQADL | | sporanodorum |
| | SISNLKHFVHQAKHDPSVSASLLKDWQSRLEHE | | SN15 |
| | LNVKSNKYEYAALFGKLVTEWIKHSTLVKSAD | | |
| | VSDGSIAKGRKKMQEQRQSWENYAFVEKEVN | | |
| | QSTIEQYLSDIFGDALQTEKIKKSPLRVLRDSMK | | |
| | EVMDFKSDLDTSEKDFSSNKRFGHSAPHGSRFTI | | |
| | ELLQSCIRGVKKADLFTGRKLEMIIDLEKQPAVL | | |
| | KELVDVLNMDVDGLDHWEWDGPVPLNMRRQ | | |
| | TNGKYRVYMDEEIHQAILLHFIGKTWAVALKK | | |
| | AFTNFYHSGAWLQAPYRSMPKKIRQRREHFIEN | | |
| | SNKSGDSVRNYRRQKYQQEYFMTQLPSNAFED | | |
| | AREYDAAEGQEKNSHIATKQTMLRLLTTEILLN | | |
| | TKVYGECSVLQSDFKWFGPSLPHDTIFAVLEFF | | |
| | GVPAKWLRFFKRFLEVPVVFAQDGAGAKARVR | | |
| | KCGIPNSHILSDALGEAVLFCLDFAVNRRTKGA | | |
| | NIHRFHDDLWFWGQETTSVQAWEAIKEFTEVM | | |
| | GLQLNEEKTGSSIIVADKSRARVPHPNLPEGNLH | | |
| | WGFLELDASAGRWVIDRAQVDEHITELRRQLD | | |
| | ACHSVMAWIQAWNSYVGLFFNTNFAQPANCFG | | |
| | RQHNDMIIETFSHIQRSFFGKYGTANVTEYLRSV | | |
| | LKERFQTTDAVPDAFFYFPVELGGLGLNNPSISA | | |
| | FATYQNSSRDPSARIERAFEEEREAYDTAKQRW | | |
| | DAGDVPCPNRETDEPFMSFEEYTAFREETSHPLF | | |
| | EAYMNLLECPVEERVETSDEMYEALRRSDAPH | | |
| | ALGSNHYWLWIFNLYAGDLKQRFGGQGVQLG | | |
| | ERDLLPVGLVEVLKSEKVRWEN | | |
| 8066 | ALVDTGAETSIIYGDPNQFSGSKAMIGGFGGQM | XP_001234064 | Gallus gallus |
| | IPVTQTWLKLGVGRLPPREYKVSIAPIPEYILGID | | |
| | ILSGLTLQTTVGEFRLRERCISIRAVQAIIRGHAEI | | |
| | EPICLPQPRRITNTKQYRLPGGQQEITKTVQELE | | |
| | RVGIIRPAHSPYNSPIWPVRKPDGTWRMTVDYR | | |
| | ELNKVTPPIHAAVPNIASLMDTLSREIETYHCVL | | |
| | DLANAFFSIPIAKESQDQFAFTWEGRQWTFQVL | | |
| | PQGYVHSPTFCHNLVASDLANWNKPSTVKMFH | | |
| | YIDDLMLTSDSIEALEKTVPSLITYLQEKGWAIN | | |
| | PQKVQGPGLSVKFLGVVWSGKTKVLPSAIIDKI | | |
| | QAFPVPTKPKQLQEFLGILGYWRSFIPHLAQLLK | | |
| | PLYRLTKKGQVWDWGRTEQEAFQQAKIAVKQ | | |
| | AQALGIFDPTLPAELDVHVTQEGFGWGLWQRQ | | |
| | GSVRIPIGFWSQIWHGAEERYSMVEKQLLATYS | | |
| | ALQAVEPITQTAEVIVKTTLPIQGWVKDLTHIPK | | |
| | TGVAQSQTVARWVAYLSQRSRLSSSPLKEELQK | | |
| | ILGPVTYHNGSSRGNPSRWRAVAYHPSTETIWF | | |
| | EEGDGQSSQWAELRAVWMVITQEPGNSALNIC | | |
| | TDSWAVYRGLTLWIAQWATQDWTIHARPIWG | | |
| | KDMWVDIWNVVRHRTVRAYHVSGHQPLQSPG | | |
| | NDEADTLARVRWLGNTPSEDIAHWLHRKLRHA | | |
| | GQKTMWAAAKAWGLPIQLPDIVQACQDCDAC | | |
| | SRMRPRPLPETTAHLARGHNPLQRWQIDYIGPL | | |
| | PRSEGARYALTCVDTASGLMQAYPVAKANQA | | |
| | NTIKALTRLMASYGTPEVIESDQGTHFTGATVQ | | |
| | KWAEDNNIEWRFHLPYNPTGAGLIERYNGILKA | | |
| | ALKADSQSLQGWTKRLYETLRDLNERPRDGRP | | |
| | SALKMLQTTWASPLRIQITSKDTSLKPQVGTMN | | |
| | NLLLPAPDDLEPGRHKVKWPWKVQAGPKWCG | | |
| | LLAPWGRLLEVGGSVNPSVIGVWPTEVIVDTPV | | |
| | FIARGTLIMSMWQIRTPPLVPDIVIQSQISGQRV | | |
| | WYRRPGRAPIQAEVLTQDRNTACILPWRADLPL | | |
| | LVPIKHLFYSP | | |
| 8067 | VKSLCQPRKHQGGHQVIHEFLCIPECPLPLPGRD | XP_874426 | Bos taurus |
| | LLSKLGVQVTFSPEERPTFRVGTPTNLLSLSVTP | | |
| | QDKWRLREPPGDKQGQATEVERRLTQLFPEVW | | |
| | GEDNPPGLARHQAPMIIELKACATLVRKCQYPIP | | |
| | RGARIGILPHISRLKQAGILVECQTAWNTPILPV | | |
| | KKEGGQDYRPVQDLRLVSQATVTLHLSVPKPY | | |
| | TLLSLLPPKTRIYTCLDLTEAFSRICLAPASQPIFA | | |
| | FEWDDPIGGNKQQLTWTHLSQGFKNTPNIFGEA | | |
| | LASDLEPFQPERYGCCLLQYVDDGLLAAETWV | | |
| | ECCEGTPVLLHLRAEAGSRVSRKKAQICKEEIR | | |
| | YLGFVLRGGTRLLDQSRKEVILRPHTPKTHRQV | | |
| | REVLGATGFCRIWIPRYSQIAQPLFELLTGPEENP | | |
| | INWTEKQQKAFEELRLAFTSACALVLPDLPKPF | | |
| | TLYVTGKDEQPWGF | | |
| 8068 | PEIANDGSQSHITFFLCASLLFPMEARSYWGDSP | XP_693232 | Danio rerio |
| | CCSPQLDDIVDHDGLQTKRSSSSPQGAPKKRTA | | |
| | FVDITNAHKIELCNPIKKKDPAKKVQKTSVLLK | | |
| | NDVNLKSIVSPEEKLEELKNVESDIEETSCKDPIP | | |
| | PHLLPPEIPPEFDIDSEHLSDSSHTSEYAKEIFDYL | | |
| | KNREEKFVLCDYMVDQPNLNTNMRAILVDWL | | |
| | VEVQENFELNHETLYLAVKVTDHYLAVSQTKR | | |
| | EALQLIGSTAMLIASKFERVEDICLNWRNGHLT | | |
| | NILLCAQHAEDKLTVKQEQDKKKAERELCMAL | | |
| | VQVANQRSNQHLTTKFKGDKGVKGEKDTRWR | | |
| | NWYVTYGDETCRACRARDVNRYQMSALATEM | | |
| | DFWLRIDPKGANQQRGADVRRGKSRMERVWA | | |
| | NSQQLQDIMSPGELHCTSHVVTDRDAEFEKAW | | |
| | FEANVNETLILEKMYWKDSLCAVSVSLSEKQRS | | |
| | FYLMSAQAVPHISVCKGKHQSWADLGPFEKQC | | |
| | LEVKDCISREGGVEWSALSQAFRVDSETETAVS | | |
| | RTVTAIDKHCVKNSCMVDFNAADIHPALAEILS | | |
| | ELWAKSKYDVGFIKGCDPVTIIAKSDYRPCQQQ | | |
| | YPLKREAIEGITPVFEALLEQGVIVPYNNSKVRT | | |
| | PIFPVKKIRDNGMPTEWRFVQDLQAVNAAVKQ | | |
| | RAPLVPNPYTILSQIPEKSQFYSVVDLANAFFSV | | |
| | PVDKDSQFWFAFNFNGKGYTFTRLCQGFTASPT | | |
| | LYNEALLRSLEPLTLTAGTALLQYVDDLLICAE | | |
| | NEETCVKDTVTVLRHLAKEGHKDMQTFATGLE | | |
| | KNKWRQSGCVMKDNVKAAQGKAAERPLHSLR | | |
| | PGDFVVIRDLRRKSWRAKLWLGPFQVLLTTETA | | |
| | VKVAERATWVHAGHCWKVPSPEKDSTRE | | |
| 8069 | VHGTLLVLQGPFVSAGGHLVIHEFLYLLGSPIPL | XP_607546 | Bos taurus |
| | PGRDLLTKLGAQITFAPGKSASLTLGRQSALMM | | |
| | AMTISREDEWCLYSSGREQINPPRLLKEFPDVW | | |
| | EEKWPPGLAKNSVPIVVDLRPGATPVRQKQYPV | | |
| | SQEACLGIWDHIQHPQNAEILIECPSPWNTPILLV | | |
| | KRSGGNDYRAIQDLRTINCSDHHPSSGPKFLHSL | | |
| | ESLTHSGKLVHLPRSHGLILLPPAVTSQPLFAFE | | |
| | WEDPHTGRKTQLTWTQLPQGFKNSPILFGEALA | | |
| | ANLAAFPSETFNCTLLLYVDNLLLASSTQGDCW | | |
| | RGTKALLALLSTTGYKVSWKKAQICRQEVKYL | | |
| | GFVITKRHWVLRHERKRAICSIPWRDTKKEV | | |
| 8070 | VVGTLPLNLLGLDMLKGKSWTDDKGREWMFG | NP_989963 | Gallus gallus |
| | VPSLNIRLLQTAPPLPPSNLTCVKPYPLPLGARS | | |
| | GISPVLAELKEQGIVIPTHSPFNSPVWPVRKPNG | | |
| | KWRLTIDYRRLNANTGPLTAAVPNISELIAAIQE | | |
| | QAHPFMATIDVKDMFFMVPLHPDDQLRFAFTW | | |
| | EGQQYTFTRLPQGFKHSPTLAHYALAKELEQIP | | |
| | LEEGVRLYQYIDDILIGGDHLTPVKIMHDKIIKR | | |
| | LEELGLTIPPDKIQSPAAEVKFLGIWWKGGMACI | | |
| | PQDTLSALDQLKMPENKKELQHALGLLVFWRK | | |
| | HIPDFSIIARPLYDLLRKGVSWGWTPVHEEALQL | | |
| | LIFEAITHQSLGPIHPSDPVQIEWGFAHSGLSIHL | | |
| | WQKGPEGPIRPIGFYSRSFKDAEKRYSQLEKGLF | | |
| | VVSLALREAERTIRQQPIILRGPFKVIKSVMSGTS | | |
| 8071 | PPDGVAQRASVRKWYAQIEHYCNIFKVTEGAP | AAA73090 | Homo sapiens |
| | KTLAIQDDILSTTDTDLPSVVQVAPPYSDQLQN | | |
| | VWFTDASSKREGKVWKYRAVALQIGTDLTIITE | | |
| | GEGSAQVGELVAVWSVFQHESESTTRVHIYTDS | | |
| | YAVFKGCTEWLPFWEKNNWEVNRIPVWQKEK | | |
| | WQDIISIAKKGQFSVAWVAAHQEDGTPVSHWN | | |
| | NRADELARIAPLRQGEPDSDNWERLVEWLHVK | | |
| | RGHTGALDLYRETQARGWPVTREQCRTCISAC | | |
| | DLCRTRLGQHPLQDAPLHLREGKHLWETWQID | | |
| | YIGPFRKSEGKQYVLVGVEIISGLLQAESCPRAT | | |
| | GENTVKALKKWFSILPKPTSIQSDNGSHFTSGVV | | |
| | QEWAREEGIHWIFHTPYYPQANGIVERSNGLLK | | |
| | KFLKPEKTNWSTRTSDAVRRVNDRWGINGCPR | | |
| | FNAFYPKAPPLLPITLNPDKLEEPSYSPGQPVLV | | |
| | DLPHVGPVPLTLMESLNKYTWRAKDAREKEYK | | |
| | INARWIIPSF | | |
| 8072 | TVGGKDIDFLVDTSAEHSVVTASVAPLSKKTIDI | O14746 | Homo sapiens |
| | IGAMGVSAKQAFCLPQTCTIGGHKVIHQFLYMP | | |
| | DCPLPLLGRDLLSKLRATISFTEHGSLLLKLPGT | | |
| | GVIMTLMLPREEEWRLFLTEPGQEIRPALAKRW | | |
| | PRVWAEDNPPGLAVNQAPVLIEVKPGVQPVRQ | | |
| | KQYPVLREALEGIQVHLKCLRTFRIIVPCQSPWN | | |
| | TPLLPVPKPGTKDYRPVQDLRLVNQATVTLHPT | | |
| | VPNLYTLLGLLPAEDSWFTCLDLKDAFFSIRLAP | | |
| | ERQKLFAFQWEDPESGVTTQYTWTQLPQRFKN | | |
| | SPTIFGEALARDLQKFPTRDLGCVLLQYVDDLL | | |
| | LGHPTAVGCAKGTDALLRHLEDCGYKVSKKKS | | |
| | SDLPTAGMLLGIYYPTGGAQPRIRKKAGHL | | |
| | PRAPRCRAVRSLLRSHYREVLPLATFVRRLGPQ | | |
| | GWRLVQRGDPAAFRALVAQCLVCVPWDARPP | | |
| | PAAPSFRQVSCLKELVARVLQRLCERGAKNVL | | |
| | AFGFALLDGARGGPPEAFTTSVRSYLPNTVTDA | | |
| | LRGSGAWGLLLRRVGDDVLVHLLARCALFVLV | | |
| | APSCAYQVCGPPLYQLGAATQARPPPHASGPRR | | |
| | RLGCERAWNHSVREAGVPLGLPAPGARRRGGS | | |
| | ASRSLPLPKRPRRGAAPEPERTPVGQGSWAHPG | | |
| | RTRGPSDRGFCVVSPARPAEEATSLEGALSGTR | | |
| | HSHPSVGRQHHAGPPSTSRPPRPWDTPCPPVYA | | |
| | ETKHFLYSSGDKEQLRPSFLLSSLRPSLTGARRL | | |
| | VETIFLGSRPWMPGTPRRLPRLPQRYWQMRPLF | | |
| | LELLGNHAQCPYGVLLKTHCPLRAAVTPAAGV | | |
| | CAREKPQGSVAAPEEEDTDPRRLVQLLRQHSSP | | |
| | WQVYGFVRACLRRLVPPGLWGSRHNERRFLRN | | |
| | TKKFISLGKHAKLSLQELTWKMSVRDCAWLRR | | |
| | SPGVGCVPAAEHRLREEILAKFLHWLMSVYVV | | |
| | ELLRSFFYVTETTFQKNRLFFYRKSVWSKLQSIG | | |
| | IRQHLKRVQLRELSEAEVRQHREARPALLTSRL | | |
| | RFIPKPDGLRPIVNMDYVVGARTFRREKRAERL | | |
| | TSRVKALFSVLNYERARRPGLLGASVLGLDDIH | | |
| | RAWRTFVLRVRAQDPPPELYFVKVDVTGAYDT | | |
| | IPQDRLTEVIASIIKPQNTYCVRRYAVVQKAAHG | | |
| | HVRKAFKSHVSTLTDLQPYMRQFVAHLQETSPL | | |
| | RDAVVIEQSSSLNEASSGLFDVFLRFMCHHAVRI | | |
| | RGKSYVQCQGIPQGSILSTLLCSLCYGDMENKL | | |
| | FAGIRRDGLLLRLVDDFLLVTPHLTHAKTFLRTL | | |
| | VRGVPEYGCVVNLRKTVVNFPVEDEALGGTAF | | |
| | VQMPAHGLFPWCGLLLDTRTLEVQSDYSSYAR | | |
| | TSIRASLTFNRGFKAGRNMRRKLFGVLRLKCHS | | |
| | LFLDLQVNSLQTVCTNIYKILLLQAYRFHACVL | | |
| | QLPFHQQVWKNPTFFLRVISDTASLCYSILKAK | | |
| | NAGMSLGAKGAAGPLPSEAVQWLCHQAFLLKL | | |
| | TRHRVTYVPLLGSLRTAQTQLSRKLPGTTLTAL | | |
| | EAAANPALPSDFKTILD | | |
| 8073 | QKINNINNNKQMLTRKEDLLTVLKQISALKYVS | O77448 | Tetrahymena |
| | NLYEFLLATEKIVQTSELDTQFQEFLTTTIIASEQ | | thermophila |
| | NLVENYKQKYNQPNFSQLTIKQVIDDSIILLGNK | | |
| | QNYVQQIGTTTIGFYVEYENINLSRQTLYSSNFR | | |
| | NLLNIFGEEDFKYFLIDFLVFTKVEQNGYLQVA | | |
| | GVCLNQYFSVQVKQKKWYKNNENMNGKATSN | | |
| | NNQNNANLSNEKKQENQYIYPEIQRSQIFYCNH | | |
| | MGREPGVFKSSFFNYSEIKKGFQFKVIQEKLQG | | |
| | RQFINSDKIKPDHPQTIIKKTLLKEYQSKNFSCQE | | |
| | ERDLFLEFTEKIVQNFHNINFNYLLKKFCKLPEN | | |
| | YQSLKSQVKQIVQSENKANQQSCENLFNSLYDT | | |
| | EISYKQITNFLRQIIQNCVPNQLLGKKNFKVFLE | | |
| | KLYEFVQMKRFENQKVLDYICFMDVFDVEWFV | | |
| | DLKNQKFTQKRKYISDKRKILGDLIVFIINKIVIP | | |
| | VLRYNFYITEKHKEGSQIFYYRKPIWKLVSKLTI | | |
| | VKLEEENLEKVEEKLIPEDSFQKYPQGKLRIIPK | | |
| | KGSFRPIMTFLRKDKQKNIKLNLNQILMDSQLV | | |
| | FRNLKDMLGQKIGYSVFDNKQISEKFAQFIEKW | | |
| | KNKGRPQLYYVTLDIKKCYDSIDQMKLLNFFN | | |
| | QSDLIQDTYFINKYLLFQRNKRPLLQIQQTNNLN | | |
| | SAMEIEEEKINKKPFKMDNINFPYYFNLKERQIA | | |
| | YSLYDDDDQILQKGFKEIQSDDRPFIVINQDKPR | | |
| | CITKDIIHNHLKHISQYNVISFNKVKFRQKRGIPQ | | |
| | GLNISGVLCSFYFGKLEEEYTQFLKNAEQVNGSI | | |
| | NLLMRLTDDYLFISDSQQNALNLIVQLQNCANN | | |
| | NGFMFNDQKITTNFQFPQEDYNLEHFKISVQNE | | |
| | CQWIGKSIDMNTLEIKSIQKQTQQEINQTINVAIS | | |
| | IKNLKSQLKNKLRSLFLNQLIDYFNPNINSFEGL | | |
| | CRQLYHHSKATVMKFYPFMTKLFQIDLKKSKQ | | |
| | YSVQYGKENTNENFLKDILYYTVEDVCKILCYL | | |
| | QFEDEINSNIKEIFKNLYSWIMWDIIVSYLKKKK | | |
| | QFKGYLNKLLQKIRKSRFFYLKEGCKSLQLILSQ | | |
| | QKYQLNKKELEAIEFIDLNNLIQDIKTLIPKISAK | | |
| | SNQQNTN | | |
| 8074 | SASFPSIPGFAGPLSLKAFLEEYFGLHLTFAAETA | AAO67516 | Leishmania |
| | SPSPRAAATAETPSAAGFRALRDVVLPPNQSFL | | amazonensis |
| | VVVYVALHASSSPPPTTAHASPTPATPDPGCAA | | |
| | PPTGLGRLRQPLAHQTAVSTAHDTCVTRCNPSD | | |
| | RQNPFCLSSSSTGKNGNARSPWCASASWLLYTN | | |
| | TSHRPFTDALLRHPWRASFSACLGPAAMGFIEM | | |
| | YCPIVLQLEAMAGGVQVIGPALKHVALETSFSA | | |
| | TAQLSEMKGLPPRGSASVSSRGVKRAVDTGECS | | |
| | APLPLQKQRRVEAVASPPKAGRRLQREVAPSHR | | |
| | PCRDDSFSSPVNRAAMPATWAAALTRTDDPRT | | |
| | RLYSVRVSDSDCTGDGGGALPLPAGSLEAHWL | | |
| | PRHPRSLHRVLQAALPKRAAYGASTRHYCAGT | | |
| | GERGTGCTSVKNISMWHVAHVFRWLVLQPSQS | | |
| | GEVAFQTTSPKFDLPSYLRRFLSTDVDQCSRLDL | | |
| | RGAALRHTGYLEEAFRRQQQGVEPWDVQRLST | | |
| | PVDVVVSYLRTLLPTLRWAPLKEANNGLFWGR | | |
| | DAAGSERVLDALMRAVRGWLIAGRQAVVPVS | | |
| | RFLDGVPVAQVPWLNGFYTTTPSLPFSDATSSA | | |
| | SRHARRERSQVQQRVWLQFVLFLTQDILPFLLR | | |
| | ASFTITWSSKNTHKLLFFPAFVWRRLVRREVRR | | |
| | TRSCHAPRSQMSLAEERTRMSGADHAALVSAP | | |
| | NACGGAVAAAFPSPHSAASNASAAISAPRDEW | | |
| | RAVRTGGALAHWSARATLATRGGGASCLYAG | | |
| | VRFRPDRRKLRPIAVVRSASLRSLKEMARGSPSP | | |
| | YSHASAIVRLLRRLGCSDADGQLPAATATLLRQ | | |
| | VQARSRHNRRTGVHRSAHPLPPHLPHKAALQD | | |
| | ALRCLVSGVEEQRVRDGLPRLSNLSHQDEYAEL | | |
| | RSFCEEVRGRHAIPCEGPAKTTPAVSSASPPGAT | | |
| | ACFAPYVTLLRSDASRCYDNLPQGRVLAAVRSL | | |
| | VKHDAYRVLRFTVIHAVDSEATCKGGCLLRRTF | | |
| | TTRTIPCAEAECGFLARIPRGHIYWEEEGRTPTG | | |
| | PHTSAAVSRTTDASSRCGANLISGAAVRALLSE | | |
| | HIRHHLVVVSGGSLFEQRVGILQGSPVAMLLCD | | |
| | RLFSNVVDTALSSILSEHAERSLLLRRVDDVLVA | | |
| | TTSPAAAERCLRAMQRGWPSVGYLSNPSKLTLS | | |
| | KACGSLVPWCGLLLHDTTLEVSVEWRRIGVLL | | |
| | GSLRVGDPHYVHRGDYEPLYLTQRFLAVLQLR | | |
| | VAPTALCGRMNSKTRQLQTFYEVGLLWTRVVL | | |
| | EKVQEALPVARNCCVTVLLLRPLAVCVGRLCR | | |
| | LLSRHQRFLAARQSACDVSAAEVRACVLTALH | | |
| | RTVQAKLRVLQARTVRAMTAQSGRTQRGPSLK | | |
| | GRRNNFCSTKASSVGRKGCEQRRRGRNRRNTR | | |
| | VCLRSFWWLTAAEVESQWRRSLGALYRAAPRP | | |
| | GEACGSTASSPSPAASASLLMEDGPLSMHARAL | | |
| | SATRLSQT | | |
| 8075 | GKKRKRPVKEPVKDDPICRAKSSPQQPAGNTAR | EAA59961 | Aspergillus |
| | SLSTNRNQAADAGKICHPVISLYYRHVVTLRQY | | nidulans |
| | ILQRIPRSSRARRRRIAAVGGHSAARDGLAAVP | | FGSCA4 |
| | KNEKDLADLLDTTLVGILKELPPTRSEERRRDFI | | |
| | AFTQAQQTTQTGTDSGPIVDFAISSIFNRPSHGK | | |
| | LENVLSHGYRQGGGRLPCSIPNVAAQFPNKNVQ | | |
| | MLKQSPWTEVLALLGSNGDEIMLKLLLDCGLF | | |
| | MAVDARKGVYCQISGQAISSLKPIDTSPEDCPA | | |
| | AFNGSSSPVKRHAVPWQGAAPRAHTKGPKENQ | | |
| | QQLSPNAIIFCRQRMLYARPHLNANGGITFGLPN | | |
| | HVLSRFHSAKSLQQTVHVMKYVFPRQFGLHNV | | |
| | FTSHSSYYENPLSKNYSSREEEIARKEGLEAARN | | |
| | QLRKSGFHAAIGERQESIKIPKRLRGKPLELIRQL | | |
| | QNRSRRCCYKKLLQYYCSEELSGPWILGQLSAE | | |
| | SNSVLSTSSSRPLVTQPSLAHQDMQRELRPTSYA | | |
| | KGFSKGSGATKPKENLTDHATPAASVSAFCRAV | | |
| | IRNLIPLEFFGVGEQGITHQKMILGHVDRFIRMR | | |
| | RFESLSLHEVCEGIKPESLRQAPSENNISASDLQK | | |
| | RRELFHEFLYYLFDSILLPLIRGSFYVTESQVHRY | | |
| | RLFYFRHDVWRRLTAQPLAHLRASIFEELAPET | | |
| | AEKLLSGKKSIGYGSLRLLPKTTGIRPILNLRRRT | | |
| | LVRSIYAGKNRYHPAQSVNSAIAPVYSMLNYER | | |
| | GRRNDLLGSSMFSVGDMHSRLKKFKESLMSRG | | |
| | WDQRKRLYFVKLDIQSCFDTIPQAKIVRLVEKL | | |
| | VSEENYHWMKYVEMRLASEFDNMWPLRKPQQ | | |
| | RRTWSKYLQRVGPVGRPENLADAIANGSVVGR | | |
| | RNTVLVDTIAQKEYNGEGLLDILNEHIRNNLVKI | | |
| | GKKYFRQRKGIPQGSVLSSLLCSLLYAEMERDV | | |
| | LGFLQTDDALLLRLLDDFLLVTLDSGLAMDFLR | | |
| | VMVRGQPDYGISVNPAKSLVNFAAVVDGAQIP | | |
| | RLVDTPLFPYCGSLIDTRTLEIFRDQDRMLEGAD | | |
| | SASVALSDSLSIDSTRTPGRSFYRKVLASIKQSM | | |
| | HPMYLDSTHNSLPAVLLNVYKSFVTAAMKMY | | |
| | RYTRSLPGRARPRPEVVVRTIHDATQLGYRLIR | | |
| | GRHGLCRVTHPQLQYLGGAAFQFVLGRKQTQY | | |
| | AGVLRWLDGTLAEARQSVGNSVLLAQAVQKG | | |
| | NRTYREWRF | | |
| 8076 | PITRSTGRGRIETEQSPPSETTATTQSMWTETTA | S33901 | Silkworm Pao |
| | NTVMSLVAPTTESSCATANTEATTKLAEKPGNS | | |
| | KTEAVKQYIAKQNDVPTKQRAGTVKSDRSRNR | | |
| | KEQKIAKAREELARLQVELAAARLATLEAGSD | | |
| | DENSESEYSKSELDERVGTWLETQPTKTENHDR | | |
| | HKETPAGACDKQDFSDLTAAITLAVKAAREPRY | | |
| | TELPFFNGNHQDWLSFRAAYHETMNSFTKTENI | | |
| | NRLRRNLKGRAKEAVDGLLITNADPSDVIRSLE | | |
| | ARFGRPETIAITELDTLRALPRLTETPRDICIFSSK | | |
| | VTNAVATLRALNCTHYLYNPETTKTMLEKLTP | | |
| | TLRYRYYDFTAVQPKEDPDLIKFEKFMKREAEL | | |
| | CSPYAQPEQAGHYSQPAQHNRRTQNVHIVSEKP | | |
| | SRAKCPVCSNTEHTTTDCYIFKKADSNTRWDIA | | |
| | KNKHLCFRCLQYKNKTHNCKPKTCGINDCKYT | | |
| | HNKMLHFDRKIEKTDNSDKETTENINSAWTGK | | |
| | QKQSYLKIIPVQVQGPIGTVDTYALLDDGSTVTL | | |
| | IDEIICKKTGTTGPIDPLHIQAINNIKSTETRSRRV | | |
| | NLTLRGLNSRKEIIQARTVNDLQVTAQKIPKEQI | | |
| | DEYSHLQDISDIITYENAKPGILIGQDNWHMLLA | | |
| | SKVRRGNRNQPIASLTPLGWVLHGGRTRTLSHH | | |
| | INYINHASETQEDDKIENLVKQYFAMDALCITPR | | |
| | RPKTDPEEQALRILNSNTVHTTDGRYETALLWK | | |
| | TDNVSLPDNYNNSLKRLINIENKLDHNPELKQK | | |
| | YTEQMEALVAKGYAEPAPKTKTENRTWYLPHF | | |
| | AVVNPPKPEKLRVVHDAAARTRGVALNDMLL | | |
| | KGPNLLQSLPGVIMRFRQHNITATADIKEMFIQV | | |
| | KLRPEDKDALRYLWRKDQRDNKPPEENRMTSL | | |
| | IFGASSSPSTAIYVKNLNAQKHEATHPEAAATIQ | | |
| | NRHYVDDYLDIFKGLKDAVLVTTDFRRKHERK | | |
| | PTSKTFWIDSEIVLRWTRTESRSYKPYVAQRLTA | | |
| | IEDSSTINERRWLPTKHNVADDVTRHVPMSYQN | | |
| | EHRWFRWTEFLRQRQNSWPTESASETTEPMGE | | |
| | VNIAAAVPAGASWPRRRHEKWKCQPRNTRMR | | |
| | GKSDSDISRSRQRGAHRRHQNQGWSSTETSTKT | | |
| | TDPAHRRRPSCTEKNATDSHGGSNVQDEIGFFIV | | |
| 8077 | PAADKRVKMFNLKRVEIMNTLQDFEEFTKSFD | CAJ14165 | Anopheles |
| | ATIDAYQIPSRLEQLEELVSEFTELRKAFNETVD | | gambiae |
| | DSEAFDIMQKDRREFNKRSHEVRAFLLKNSSHS | | |
| | GASSGLNTTQVNTTISAGTQNHLRLPKVDLPSF | | |
| | DGEITKWLTFKDRFSSMVHDSTEMPEVLKLQYL | | |
| | LSALKGDAAHQFEHMQITADNYYVTWEALLKR | | |
| | YDNSKVLKREYFKAFYSLEKMKTDSTEELARIV | | |
| | NEANRLVRGLERLNEPVDKWDTPLTSLLFYKL | | |
| | DSKTLVAWEQYSVDFKTDEFTNLVEFLEQRVNI | | |
| | LKSSAQNICNQYSANSIMVTGRQARRDGRNVA | | |
| | LPVQQTNNTFKGYLKCPLCNEQHPLHVCERFER | | |
| | ASVINREEIVRKHGLCFNCLRKGHSARECRSTY | | |
| | VCQQCKRKHHSKLCKIGRLSEVEVVPSTSRLTA | | |
| | TAQANCSKKTVILSTAQIIILDVNDQPYKVRALL | | |
| | DNGSQLNFITERVAQELRLKRARVSEQIAGVGG | | |
| | AIMRVAGSVVGTIRSLTTEYTTCLEFLILPKIATD | | |
| | LPSETMDVRGWKLPKDVRLADPTFHERGSIDM | | |
| | LIGADTFVEMIKAKKIKLDHELPTLLETELGWIV | | |
| | SGAYKHNNLNQSMACTIVSQGGENDIASLMNT | | |
| | FFNIEEVQDQNLWNVEERECEDHFQATTRRDEN | | |
| | GRYVVRLPLKAERELGESKEVALRRLIGLERRF | | |
| | EREPKVKEAYEAFMQEYITLGHMSVRENENSSD | | |
| | GYYMPHHAVFKQDSTTTKCRVVFDGSCKTSNG | | |
| | RSLNDILKVGPTIQQDTTDILLRWRRRAIAVVGD | | |
| | VEKMYRQVWVHEEDRKFQRILWRSHSSEKIKT | | |
| | YELNTITYGTASAPFLAIRTLNQVLEDNKEKYPL | | |
| | AASRINDFYVDDFISGADSENEAKQLCEETKAA | | |
| | LAMGGFPLRKWASNCPHILPSETEIDNIQRVIEL | | |
| | KSREGAVSTLGLVWNPILDTLGVKISEPETCEIY | | |
| | TKRSIIRTIAKIYDPLGIVDTVKAKAKQFMQRV | | |
| | WSLKKENGDSYGWDEEIPQQMRQEWEVFERQ | | |
| | LTHLQEVQVPRCVTIVGARNIQIHGFCDASEEG | | |
| | YGACVYVRSTNGEEIVSRLFVSKSKVTPLATKH | | |
| | TIARLELCAAHLLGKLLVKLKRATEDPYETFCW | | |
| | TDSSTVIYWLKSSPSRWKTFVANRVSQIQNATK | | |
| | EFEWRHVPGIHNPADAVSRGRNPAEVVEDKLW | | |
| | WHGPDWLVKDPKHWPKNIESGNTCETAKEEK | | |
| | QTKTTLTCMVKEESFINKLCERVGSFTKLKRIVA | | |
| | YCHRFFDRKRIHRKSYFELRELKRAEKTIIRLVQ | | |
| | NEVYATEYECIKQGQQVVRKSPLRVIRPILDKD | | |
| | NVMRVGGRLSNADIKDEQKHPVIIPGKHRIAELI | | |
| | ADKYHKILRHAGAQLMINTMQLRFWIVGARNV | | |
| | AKRTVFNCVKCTRCRPKLIQQPMADLPEQRVR | | |
| | QARPFSISGVDYAGPIMVKGTHRRAVPTKGYISI | | |
| | FVCFVTKAVHIELVSNLTSSAFLAALRRFVARR | | |
| | GHVTELHSDNGTNFRGANNKLRELYKLLNSDT | | |
| | HQDEVVGWCAERDMKWKFTPPAAPHFGGLWE | | |
| | AAVKSMKFHLKRVLGTGHLTFEDLSTLLAEIEA | | |
| | CLNSRPITAISEDPNDMEALTPGHFLVGNHLQTV | | |
| | ADVDIADVPTNRLNHWRLIQKHMQHIWNRWH | | |
| | REYLSTLQKRAKWNKNAISIEPGRLVILQEDNV | | |
| | AVSKWPMARVVDLHPGKDGVTRVVTLKCANG | | |
| | KEIRRPIHRIAPLPIES | | |
| 8078 | TLGSSRSPSPGRRRHASEGGTAVPPTPANCGKPT | T26836 | Caenorhabditis |
| | KKRTRGQVSLATRIVGPLKRRINHKVDAAKRIL | | elegans |
| | AETEAKMEILLNMPQDQLVSSEDSTYLDALLIR | | |
| | LQTILVALEGMRDLISDKFRDTEMMVDPNRHQ | | |
| | HHQEVLDYLEKSSTARFVDHLTHDIQQLETEMR | | |
| | SRNIPITHFDPSLLATTDVETGATTEDDANDEER | | |
| | RDIEATIEDHAQNNGPSDHRVISDLRTPHGSTPS | | |
| | TGTPRLSSPGMVWDNEGLSLHDELQIANLLDPA | | |
| | NPQRSPMAPAAPTSSAAAPTQSAAAPPSSATAP | | |
| | MSSAAAYHLHGQHGQQLGAPAHTNGGTTHRQ | | |
| | QPLEQRIQTTTKGVLQGKREQLKQGPTETPLLV | | |
| | QHAPTTTGPGTRITPQRVLNAPALQTHQVINSQ | | |
| | VGYPSAGAHEYSAFHPLLQYAPPRGEDTLTHRL | | |
| | LAAIEAIATSQSQMQSELISQGRSVHVLTDRME | | |
| | ATEKLIVEPKILNTTVAEETSRPAMPQPTHETAQ | | |
| | QQQTTGSEYEYEFDSDDDNNQQPLPPQPRTEIR | | |
| | YVEVKNNGSHDTQNLLKYLGKYDGNSNIDSFL | | |
| | TDFKESVMENENLNQANKFMILKTHLLGKARD | | |
| | CISRDHVTAKALEKTITSLKSVFGKDENKTSLLA | | |
| | QIHAIGFPQSDVREMRRAIAKHSILVEQLVNSGL | | |
| | AANDERTFTPLTSRLPPAIRTRVTQFWGSKGEN | | |
| | ATFQEIFDYVTTCVDDMARESILALRHLPTAESE | | |
| | TEVGPLGIPYSGQINHANATTQNQGNPNGKKTS | | |
| | ISLADKPVYKREDHPKTYYDSNTGESLPGYNAP | | |
| | GKQGPVLRLLPRTFPLYEGTTKKTCKACKGSHH | | |
| | TLRCTLSSKDFRQALNASRLCPICTGYHSVEQCR | | |
| | CLMKCILCQGLHHTGGTLSPTSAIPTINPLLTFLP | | |
| | TFSDSAHFEITSTNIYNGRRIDMILGNDLLAWLN | | |
| | ANPETKKHILPSGRLVEITDFGHIVHPVPDKTIY | | |
| | QNHTQIEVTSETFMHASALINGPNPEDPNLALTL | | |
| | QVEQQWKLENIGIEAQPLNDHTTTSAKDLQASF | | |
| | ENTLRYTPEGILEVAFPLNGNEVRLKDNYEVAV | | |
| | KRLHATVNALKNSKNPNLLKQYDEIFKTQEASG | | |
| | IIESVTPNMKLETKYNYNMPHRAVIKESSNTTK | | |
| | VRVVYDASSHAVGQLSLNDVVHAGANMVIPLF | | |
| | GILIRSRFIKLMIVGDLEKAFHQVQVQPEFRNLT | | |
| | LFLWLTDLNKPITRDNICTKRFVRLPFGMSCSPN | | |
| | LLASTIVHFLVHNPDELNNDILDNLYVDNILIGT | | |
| | NDLALIMNRITRLKQIFSHMKMNIREFVVNHDE | | |
| | SMEKIDPKDRVSARTIKLLGMKWNSSPDADTYT | | |
| | IKIADVQTIMHPTKRDVASKMAETFDPLGLISPI | | |
| | QVSMKRLIQKLWSHEVNWKDPIPKHLLDDWQ | | |
| | AIQASFIDRTITVPRRLTTDFEYKDIQLLISSDASQ | | |
| | DIYAAAAYVYFSYGDDRPPVISLITSKNKIKPSR | | |
| | ETNWTIPKLELLGIEIGSNLASSIVKELRCKVTNI | | |
| | RLFTDSSCALYWILSKKNTRVWVANRIDQIHLN | | |
| | QTRMSECGIDTSIHHCPTKDNPADIATRGMSTSE | | |
| | LQNSDLWFNGPEFLKQKPEDWPCKIEGTFTCPA | | |
| | EFQAVVFAEILDPKTKKTKKPLMEKAEKPPASE | | |
| | TVLHILELPSKFESIISFRYTNSLRKLMLVTYRTL | | |
| | LAISKMRKGKVPTSWILEKFMMAPNLLEKRRV | | |
| | ARHYIFLQHYKECAEQGLTFPSSLRYYVAPDGL | | |
| | YRVLKQAKSPTLPAEANEPILVHPKHPLANLLM | | |
| | LETHEINGHLPEQYTRAALRTRYWLPNDSSVAR | | |
| | SVISKCIQCKKVHGLPFPYPHSMTLPESRTTPSTP | | |
| | FQNAGLDYMGPVEYSKDDGVSTGKAYVLIYTC | | |
| | FTTRATILRVVSDGSTERFIMALKTIFHQVGVPK | | |
| | MVYSDNAPAFILGGSILNDDISTWEHHSDPLTSF | | |
| | MATQSIHFFRITPVSPWQGGMYERIVGLVKHQI | | |
| | LKVCGADRFDYFTLSYIVSSAQAMVNNRPLMQ | | |
| | HSRQPDDMIAIRPCDFLNPGVMIETPPTEFTPSAP | | |
| | SGVPEQRVRAHLASLEETIELLWKYWSLGYIINL | | |
| | RQNHHRNVRCADLKPTVGQVVLVNTNLVKRQ | | |
| | NWPLGVIVQVNRSERTDEIRTAVVKCKGKLYK | | |
| | RSVCQLIPLEVQSSDMDSLPDTENREDGQECLM | | |
| | DAGMTVQHPSAPPLTIPSAALFDSPDEHYSPELF | | |
| | PRETCPNVTEATENPSPKIQNNTMIPLVPNTSTIQ | | |
| | NARLDLHERVGEVDNFENPDLDQVHVDSKDEV | | |
| | EYQDPSTTEELPTAIPGRSRPILPRRVKKPVYYN | | |
| | YFLHTTTAVTSTFSTPECCEMIPSPNYLVL | | |
| 8079 | EHLGVDPNPLHPIDQYTLLAANKILQRTKRYAE | NP_508646 | Caenorhabditis |
| | ALENLRHYVDDKFQEPVLRGSPLKDVYHEQVQ | | elegans |
| | EHLARLQPKSLLTEAKRDITMLERELLNHGFPIT | | |
| | TSDPQELVLTPYEYETSEDGTSSSDVDDLASFDG | | |
| | AFDNLRETMGSDHVQIDHQNPNPRVTIPSAILSP | | |
| | PTNGSSHLNYRTVSQPSPLTVHRDSALGSLSRQP | | |
| | SLADELQDERHQHRLSQIRLRALEDTFIARRQA | | |
| | DEEAEELGRQQLSQYREMRAARERRLEEMRSQ | | |
| | PSPPQAPAPAPRRPHTVHSGAEPTTPDLVPAPAL | | |
| | TGYPTPEQLLPQAMLQAMTEMGRLISQLQRDQ | | |
| | TQARREQTSFMNECREHLRPPAEGSIGQSAYSP | | |
| | DDEGEEQSQRGSSPPVQPIPDSRSPSGVINFETNA | | |
| | KNLPKFDGTGNFRAFRNGFDTVVLDDPRLPSVT | | |
| | KCNLLRNHLVGNAQQCISHDDDPLVAYQTTMD | | |
| | MLESVYGKGDTQRGLLERFRKLKFHQSNPEQM | | |
| | KLDLTSHQLLVQRLVSTGLSATDDRITMGLIGK | | |
| | LPISFRDKVTEFYTDMDDHPSAIAFYQRIRKHIN | | |
| | SFENGLIAASLQPLHVAPVNEIPSHYVKGSVHV | | |
| | VDQKQQPKKGELRHPTSSSGGQKERDTSAFYID | | |
| | PATGAQLGGHLRPGKRGVHLTLIARTFPLPDET | | |
| | SKKPCAACGGSHSPTRCHLTSQAFREATAQKGL | | |
| | CANCCGKHAIEQCKSHFTAPAFSDQDAHHLDSL | | |
| | EIDHLSISSQRTFDGKRIDMILGNDVLTCLHGDR | | |
| | HTRRHQLPSRRVVDDTRIGYIVHSVPSLILYTSD | | |
| | ERKWVFNDQNGLTHSLMLANMVLDHQYVEDP | | |
| | ELKLHWSIEQLWKFENLGIEPIPLVDETKKSTQD | | |
| | LLAEFQQNACYTNGVLEVALPENGNEEKLKNN | | |
| | YAIAYKRLCSLHETLTKGKNLITKYDRVIKDQL | | |
| | LAGIIELVTPEMKPDSPIEYFMPHRAVIKESSNTT | | |
| | KLRVVLDASSPIGKDLSLNDCLHAGTNLLTPLY | | |
| | GILLRSRCYRYIIVADIEKAFHQVRLQVKHRSVT | | |
| | QFLWLADPSQPANADNVVRYRFTRIPFGVASSP | | |
| | FLLGAAIHHFLGRNPHRLNNEIRDNLYVDNCML | | |
| | GTDDFTKVMPTAMAAKSIFRKMNMNLREFVTN | | |
| | CDGIMQHIRAEDRAESRDIKLLGCMWNSNETV | | |
| | DTYSIKIAVLDIDHPTKREVASKLAETFDPLGLV | | |
| | TPILVQFKRLIQQLWIAGVSWKDRIPIELLPLWR | | |
| | NLQKSFVDKSIHVERRLTFVNEEVIDCQLIIFTDA | | |
| | SQDIYAAAAYAHFTYKKWPPVTRLITSKSKIKE | | |
| | VSAANYTIPKLELLGILCGSNLAVTLSKELRLPIS | | |
| | SIKLFTDSSCALYWILSAKNTRAWVHNRVQKY | | |
| | HENCARMSECGLSTSLHHVPTKENPADLATRG | | |
| | MSTTELQKSLFWFRGPRFLANPPESWPQKIEGTI | | |
| | TCPAEFQDLVYKEIIDTSTEKKKSKPLIEKAIPAA | | |
| | PKATESVLHLTTGPFKSFIPTLNSVCKMFPGKSW | | |
| | DSEIMVEFKNSESALHRRKLVRKLIILHHYRESE | | |
| | ALGLKLPADLDYYVDSHGFYLVKKQVTSHALP | | |
| | QEANEPVILFKDHPLATLVMRETHVINGHSSEL | | |
| | YTVSAAKTMFWIPHIKVLAKSVVSNCVDCKKV | | |
| | HGLPFRYPNSKTLPEKRTSPSKPFATAGLDYMG | | |
| | PIEYLKDDGVTIGKSYVLVYTCLVTRGAMLRVL | | |
| | PDATTETYLMGLRSIFHCVGSPTDIYSDNAAIFK | | |
| | LGASMLNDDILSGDELSDSLTSYLASQQINFFYI | | |
| | TPLSPWQGGVYERIVGLLKHQLYKVSSVEKLS | | |
| | MFSLQYLVSGAQAMINSRPLTPHARSPNDMIAL | | |
| | RPIDFQLPGVMLDIPFVHPTGNGRGAEERARAH | | |
| | LAQLETALNRLWQIWTLGYLFHLRKAKHRNKK | | |
| | CTSIKPAVGQVVLIDTNHVNRHKWPLGVILQVH | | |
| | ESKRDHEVRTATVKAHGKRCLRSVCQLIPLEVQ | | |
| | ASEDFTSADPPSEGDLVELEEHDCDDPTSDIPTQ | | |
| | AYFEHSRSTARTLLRVSPRVSEIRCLSLGRVTDS | | |
| | PLLVPSVNNN | | |
| 8080 | FIGSIASNSSLTDCQRFHYLKSYLAGDALALVKH | AAB03640 | Drosophila |
| | IPVTNDNYREAWERLEQRYNKQSLIIRSFLNSFM | | melanogaster |
| | SLPSAINSNIGTVRKIADGADEVIRGLRALNCEE | | |
| | RDPWLIFILLSKLDSDTRQAWAQCAESEEKGVTI | | |
| | NRFLKFLTSRCDTLEAFELTRSTQARRAATTHH | | |
| | ADTHPRREEPKCTSCQQNHQLFKCPQFIALDIAS | | |
| | RRDFLKSRKLCFNCLSPAHMVGNCTSRHTCRIC | | |
| | RRKHHTLVHGSSQPIQNGNNIDTASVDSRDRPA | | |
| | VSHAGSTIGHNQPLAREGHRLGSETPAENNFTH | | |
| | HTLENIPAAGSQTLLPTILADVIDAWGNTTTCRL | | |
| | LLDTGSTITLASESFVQRIGVRRTHARISILGLAA | | |
| | NSAGVTRGRAHIKLRSRHSGQTVELVSFILTSLT | | |
| | SSLPAQVIDTSSSTWRQICELPLADPTFCTPGAID | | |
| | VIVGSDQLWSLYTGDRKHFGNDFPIALNTVFG | | |
| | WILAGSYSAFDDHPTSAVTHHADLDTMVRSFM | | |
| | EMDSIQPNQALLDASDPTERHFAATHKRSTDGV | | |
| | YVVEYPFKEKAPPIDSTLPQAINRFFSLERKFRR | | |
| | YPELKQQYEAFLDDYLQRGHMEKLTSAQVEES | | |
| | PDTCFYLPHHAVIKLDSLTTKCRVVFDGSGKDS | | |
| | SGVSLNDRLHIGPPIQRDLFGVCLRFRQHQYVL | | |
| | CADVEKMFRGIKVFKPHTNFQRIVWRTTENEPL | | |
| | LHFRLLTVTYGLAPSPFLAVRVLKQLADDHGHE | | |
| | YPAAAHALLHDAYVDDIPTGANTFEELMILKDE | | |
| | LIALLDKGKFKLRKWSSNSWRLLKSLPEEDRCF | | |
| | EPIQLLNKSAADSPVKVLGIQWNPGKDVLYLNL | | |
| | KGCDATISPTKRELLSQLSRIYDPLGLVAPVTVL | | |
| | LKLIFQESWTSVLQWDDPIPESLRTRWRALVED | | |
| | LPALTQCQVPRYIASPFRDVQLHGFADASSHAY | | |
| | GAVVYARVAVGCSFQVTLVAAKTRVAPIKPVSI | | |
| | PRLELNAALLLSRLLSIVKTSLTIPLESTSCWTDS | | |
| | EIVLHWLSAPPRRWNTYVCNRTSEILSDFPRSC | | |
| | WNHVRTEDNPADCASRGLHPSKLLEHRLWWK | | |
| | GPSWLATPTSEWPPSTSKFSVSSSFDVNTEERAI | | |
| | KPTTLHNFPDESIHELLIHKFSTWTRLIRVSSYCH | | |
| | RFIHTLRSHHRNSAPFLTSEELLDAQRRLIRHVQ | | |
| | QKSFAREYEQLENRRQLNAKSHLIRFSPFLDDY | | |
| | GVMRVGGRIEQSTLNYNAKHPILIPKDTPLAGL | | |
| | LVRHFHVSYLHTGVDATFTNLRQQYWILGARN | | |
| | LVRKAVFQCKSCFLQRKGTSNQIMGELPIPRVQ | | |
| | ASRCFQHTGLDYAGPIAIKESKGRTPRIGKAWFS | | |
| | IFVCLTTKALHIEVVSELTTQAFIAAFQRFIARRA | | |
| | KPTDLYSDNGTTFHGGKKTLDDMRRLAIQQAK | | |
| | DEELAGFFANEGISWHFIPPSAPHFGGMWEAGV | | |
| | RSIKLHMKRILGSKALTFEELSTVLTQIEAILNSR | | |
| | PLCPTGDNSLDPLTPAHFLTGSPYTALPEPCRLD | | |
| | MQVNRLERWNQLQAMVQGFWKRWHMEYLTS | | |
| | LHERTKWHLETENLKIDTLVVLKEPNLPPSKWI | | |
| | LGRITAVHAGIDNKVRVVTVKTAHGLYKRPIAK | | |
| | IAVLPLC | | |
| 8081 | VRGAGVRSRGRGRGRVLKGTGESDGHSAKVEQ | CAB78181 | Arabidopsis |
| | SVGSQPEFVEPGVRNGLGADIAGATGVGAGGA | | thaliana |
| | GVGTGVHAVGAEGPGVMGAAAGGAQVPEVGL | | |
| | AGLLRQLLERLPGVVPVETPVAPRVAEVQQRA | | |
| | AVAEEVLSYLRMMEQLQRIDTGYFSGGTSPEEA | | |
| | DSWRSRVGRNFGSSRCPAEYRVDLAVHFLEGD | | |
| | AHLWWRSVTARRRQTDMSWADFVAEFKAKYF | | |
| | PQEALDPYAGQGMEDDQAQMRRFLRGLRPDLR | | |
| | VRCRVSQYATKAALVETAAEVEEDFQRQVVGV | | |
| | SPVVQPKKTQQQVTPSKGGKPAQGQKRKWDH | | |
| | PSRAGQGGRARCFSCGSLDHKDAGGQFLAVLG | | |
| | RAKGVDIQIAGESMPADLIISPVELYDVILGMD | | |
| | WLDYYRVHLDWHRGRVFFERPEGRLVYQGVR | | |
| | PISGSLVISAVQAEKMIEKGCEAYLVTISMPESV | | |
| | GQVAVSDIRVVQEFQDVFQSLQGLPPSQSDPFTI | | |
| | ELEPGTAPLSKAPYRMAPAEMAELKKQLKDLL | | |
| | GKGFIRPSTSPWGAPVLFVKKKDGSFRLCIDYRE | | |
| | LNRVTVKNRYPLPRIDELLDQLRGATCFSKIDLT | | |
| | SGYHQIPIAEADVRKTAFRTRYGHFEFVVMPFG | | |
| | LTNAPAVFMRLMNSVFQEFLDEFVIIFIDDILVY | | |
| | SKSPEEQEVHLRRVMEKLREQKLFAKLSKCSFW | | |
| | QREMGFLGHIVSAEGVSVDPEKIEAIRDWPRPT | | |
| | NATEIRSFLGWAGYYRRFVKGFASMAQPMTKL | | |
| | TGKDVPFVWSQECEEGFVSLKEMLTSTPVLALP | | |
| | EHGQPYMVYTDASRVGLGCVLMQHGKVIAYA | | |
| | SRQLMKHEGNYPTHDLEMAAVIFALKIWRSYL | | |
| | YGGKVQVFTDHKSLKYIFTQPELNLRQRRWME | | |
| | LVADYDLEIAYHPGKANVVVDALSRKRVGAAL | | |
| | GQSVEVLVSEIGALRLCAVAREPLGLEAVDRAD | | |
| | LLTRVRLAQKKDEGLRATKMYRDLKRYYQWV | | |
| | GMKMDVANWVAECDVCQLVKAEHQVLGGML | | |
| | QSLPIPEWKWDFITMDLVVGLRVSRTKDAIWVI | | |
| | VDRLTKSAHFLAIRKTDGAAVLAKKFVSEIVKL | | |
| | HGVPLNMKEAQDRQRSYADKRRRELEFEVGDR | | |
| | VYLKMAMLRGPNRSISETKLSPRYMGPFKIVER | | |
| | VEPVAYRLELPDVMRAFHKVFHVSMLRKCLHK | | |
| | DDEALAKIPEDLQPNMTLEARPVRVLERRIKEL | | |
| | RQKKIPLIKVLWDCDGVTEETWEPEARMKARF | | |
| | KKWFEKQVAA | | |
| 8082 | VEVLEEEVEVQTLTPSRSEGASGSRNPRHRRRG | AAM08509 | Oryza sativa |
| | SRTPPLSDPLRREAGGALLRHPPVNVEPEAPVQ | | Japonica Group |
| | RWLDDVANLVTTAQRRLAVSGRSTATGTSRTS | | |
| | TTLSSSARRRARRIATASRRSTAPTSSGASESRR | | |
| | RHDSLYGEQDARVNIERRRDERRATRMGEGAS | | |
| | SSGVPRFSSRGGPPLTSTPGGTGYKAFVASLRNV | | |
| | RWPPKFCLNLTEKYNGSINPSEFLQIYTTIIVAAG | | |
| | GDDRVMANYFPMALKAHAVVYAFWNGVRHN | | |
| | RKLEKIASKEPKTTAELFELADKVAQKEEAWA | | |
| | WNSPSTGAAAAAAPETAPRSKRRDRRGKRKPA | | |
| | RSDDEGHVLAADGPSRAPRRERATDGKTSYTA | | |
| | PSGKGRSADKWCSVHNTYRHSLADCRSVKNLA | | |
| | ERFRKADEEKRQSRREGKALTTPANDQREESKK | | |
| | KAPADDGDDSEGLEFQDILCKVLRDKCGQKSA | | |
| | AKTCGILEFVRDNSRVRSQKAVFLMAEKPPPSP | | |
| | SSASPGSVKEKIQQLDLSEVNEGNVMTITLDKLT | | |
| | PDQKEFEAMMQQARNQFLNSFMQTRKGTVVQ | | |
| | KYQVRVVADVPGTGSSKDGEMKQALGGSAQP | | |
| | SNKGATNGSAQENQGDHSQGVHGVQGDGTQG | | |
| | PRGGSLNQDGSASQEFFNNFQDRVDYAVHNAFI | | |
| | NQSGVLVNTLSNMMKSIADGSIAKHQAAGPVY | | |
| | LPGGQLVNPRQLMRENPQHSGQVANRLTQDQV | | |
| | ATMFLPLQPTVDLVQQQPIQQTPPIQQVVQPIQQ | | |
| | QVVHWADLEKQFHSYFYSGVHEMKLYNLTAIK | | |
| | QRHDEPVHEYIQRFREMRNKFISLSLTDAQIADL | | |
| | AFQGMIAPIREKFSSEDFESLPHLTQKVTLHEQR | | |
| | FAEARRNSRKVNHVCSYMCGSDDEDDDSEIAA | | |
| | AEWVRSKKVMPCQWVKNSGKEERYDFDITKA | | |
| | DKIFDLLLWEMQIQLPAGHTIPSAEELGKKRYC | | |
| | KWHNSGSHTTNDGKVFRQQIQSAIEGGKIKFDD | | |
| | SKKPMKVDGNPFPVNMVHTAGQTADGGRARG | | |
| | FQMNSAKIINKYQRKYNKQQEKHYEEGDDGFD | | |
| | PHWGCEFFRFCWNEGMRLPYIEDYPGCEQAVF | | |
| | KKPEGAENRHLKPLYINDYVNGKPMSKMMVD | | |
| | GGAALNLMLYATFRKLGRNAEDLIKTNMVLKD | | |
| | FGGNPSETKGVLNVELTVGGKTIPTTFFVIDGKG | | |
| | SYSLLLGRDWVHANCCIPSTMHQCLIQWQGDKI | | |
| | EIVPADSQLKMENPSYYFEGIVEGSNVYTKDTV | | |
| | DDLDDKQGQGFMSADDLEDIDIGPGDRPRPTFIS | | |
| | QNLSSEFRTKLIELLKEFRDCFAWQYYEMPGLS | | |
| | RSIVEHRLPTEPGVRPHQQPPRRCKADMLEPVK | | |
| | AEIKCLYDASFIRRCRYAEWVSSIVPVIKKNGKE | | |
| | RVCIDFRDLNKATPKDEYPMPVADQLVDAASG | | |
| | YKILSFMDGNVGYNQIFMAEEDIHKTAFRCPSAI | | |
| | GLFEWVVMTFGLKSAGATYQRAMNYIYHDLIS | | |
| | WLVEVYIDDVVVKSKEIEDHIADLRKVFERTRK | | |
| | YGLKMNPTKCAFGVSAGQFLGFLVHERGIEITQ | | |
| | RSINVIKMIKPPEDKTELQEMIGKINFVRRFISNL | | |
| | SGRLEPFTPLLRLKADQQSTWGAEQQKALDNIK | | |
| | EYLSSPPVLIPPQKGIPFWLYLSAGDKSIGSVFIQ | | |
| | KLEGKERADVVKYMLSAPILKGRIGKWIFSLTE | | |
| | FDLWYESQKAIKGQAIANFIVDHRDDSIGLVEV | | |
| | VLWTLFFDGSVCTHGCGIGLVIISPRGACFEFAY | | |
| | TIKPYATNNQAEYEAVLKGLQLLKEVQADTIEI | | |
| | MGDSLLVISQLAGEYECMNDTLIVYNDKCQEL | | |
| | MKEFRLVTLKHFVQEHIIYRFGIPQTVTTDQGSI | | |
| | FVSDEFVQFADSMGIKLLNSSPYYTQANGQAEA | | |
| | SNKSLIKLIKRKISDYPRQWHTRLAEALWSYRM | | |
| | ACHGSTQVPPYKLVYGHEAVLPWEVRIDSRRTE | | |
| | LQNDLTADEYYNLMADEREDLVQSRLRALAKV | | |
| | TKDKERVAWHYNKKVVPKDFSEGELVWKLILS | | |
| | IGTRDSKFSKWSPNWEGPFQIHKVVSKGAYML | | |
| | QGLDGEVYGRALNGKYLKKYYPSVWVNA | | |
| 8083 | LHDDLQRGPSIIKNTPPPFVIQFGSLPPVTFFEYG | BAB08213 | Oryza sativa |
| | SKVYMQQAQDVTQFQEAQSKKORKRASAKAK | | Japonica Group |
| | KERRTLMLEARTLLKESVVAEIKGDIQAAQKLR | | |
| | VKASNRRSITASLRAPDPVATPKLPTPTVQHTEV | | |
| | ELLEALEAVSDNLRRHISHTRRANSPHPLRNYR | | |
| | RKYRKVQRLHQLVSSRIAQSSLLEEDWSLDTSV | | |
| | LIKKVFKFPSILEPPYDLFPDEWACEPTKIKEKVR | | |
| | CAIMKEYWKRRDREHLVLPGSTIFVDYNTYTPR | | |
| | QQSTWESCLHLSAVGGSSDYNNNRFAVLRSEA | | |
| | PAPRSEDLRQELRELQDRMAQLGRRLQDHEAP | | |
| | RSSSTQAGGRSRRYQPSYHPQHDRRTLAPRRTL | | |
| | PSTQVMHQRQTALPPRWNRWSRHQDYPTSSRL | | |
| | AQEWRVREAPSSQVPPHVPSSPRREVYTQRRRE | | |
| | TNAPNPATRQVAPPLLPTPSIPPRRQHAPTENQR | | |
| | KRERRRNNRYALYRELEDLVLKHTQVRVRPDG | | |
| | EVHQEDERIVFRISPSLERDARYNYLIARLTPKP | | |
| | RRTLDVADKNREQALTQPCPVTILQRGKGPVQ | | |
| | ATLGISLSTSARQSKENQSTPMEGVEQTPVEQV | | |
| | DKASRQEEAIINPMVDVLPQQESSSVPPARVEQ | | |
| | VAGSKNIEDPKESIVMCSALAAHYETKPNAAW | | |
| | VPPPVTHDFTYPSDEEIVPNPRANFSKTFLPQLD | | |
| | QVASRPGANTRMKAIAIKNVEATPSQARKDLED | | |
| | HVEVEDLDELESTSSSSLEVNLNLPRYNELNPSL | | |
| | PSDGEGYPNNFDSAPAHVTAEGDPRQHARQHA | | |
| | PRGENPSIGNWATMKEVFKKHFVAMKKDFSIV | | |
| | ELSQVRQWRDEAIDDYVIRFRNSFVCLAREMHL | | |
| | EDAIEMCVHGMQQHWSLEVSRREPKTFSALSS | | |
| | AVAATKLEFEKSPQIMELYKNASAFDPTKRFNA | | |
| | TKPSGSGNKPKVPTEANSTKVFSTAPQGQVPMI | | |
| | GAKNEQVGGRQRSTLQDLLKKQYIFRRELVKD | | |
| | MFNQLMEHRALNLPEPRRPDQVTMTDNPLYCP | | |
| | YHRYIGHAIEDCIAFKEWLQRAVNEKRINLDAD | | |
| | AINPDYHAVNMVSVEPFPQKQREGRRATSWAP | | |
| | LAQVEDQIAKIMLTKAPATHVEASHGDNNRAW | | |
| | SIVRWKPQPMSFPPRRPQMKLSPHTHPTSRRWL | | |
| | DPSRRRPPPRFVPFSEGDESFPRRGRELPTLAQFL | | |
| | PKGWEQSSTSTREAKGVNNSIPTPDIAPCNVILT | | |
| | YNDSTSTGSDETFTGREREIFHAELDPEKTKVEE | | |
| | VNISLRGGKTLPDPHKSKVPNVDKPAKKASPPG | | |
| | EAPEAPETKTGSKEKPAVDYKVLAHLKRIPALL | | |
| | SVYDALMMVPDLREALIKALQAPEVYEVDMA | | |
| | KHRLYDNPLFVNEITFADEDNIIKGGDHNRPLYI | | |
| | EGNIGSAHLRRILIDLGSAVNILPVRSLTRAGFTT | | |
| | KDLEPIDVVICGFDNQGKPTLGAITIKIQMSTFSF | | |
| | KVRFFVIEANTSYSALLGRPWIHKYRVVPSTLH | | |
| | QCLKFLDGNGVQQRITSNFSPYTIQESYHADAK | | |
| | YYFPVEENKQQLGRTTPAADIIVEPGTETTPEHV | | |
| | YPIYYTNIAQSKTLYLNTDHLGGNFSRKRETAQ | | |
| | KQRRCANYHHLTGKTESKQGSRACTTGSGQEE | | |
| | SCRDRGGKSGCSVHAAPSPLHFSFYPAREEACT | | |
| | TMKAEPRMARLLEKAGINLQRNNRLPPPPAVCE | | |
| | DWWAQAEEFIKRRCKEQPKYGLGYINVDEPDD | | |
| | EDEVFEDDIFHCCTISTTTRGDALLQQHPFEVAA | | |
| | VGVEEELDVAGALKOLDDGGQPTIDELVEMNL | | |
| | GTEDDPRPIFVSGMLTEEEREDYRSFLMEFRDCF | | |
| | AWTYKEMPGLDSRVATHKLAIDPQFRPVKQPP | | |
| | RRLRPEFQDQVIAEVDRLINVGFIKEIQYPRWLA | | |
| | NIVPVEKKNGQVRVCVDFRDLNRACPKDDFPLP | | |
| | ITEMVVDSTTGYGALSGYNQIKMDLLDAFDTAF | | |
| | RTPKGNFYYTVMPFGLKNAGATYQRAMQFVL | | |
| | DDLIHHSVECYVDDMVVKTKDHEHHQEDLRIV | | |
| | FERLRRHQLKMNPLKCAFAVQSGVFLGFVIRHR | | |
| | GIEIEPKKIKAILNMPPPQELKDLRKLQGKLAYIR | | |
| | RFISNLSGRIQPFSKLMKKGTPFVWDEECQNGF | | |
| | DSIKRYLLNPPVLAAPVKGRPLILYIATQPASIGA | | |
| | LLAQHNDEGKEVACYYLSRTMVGAEQNYSPIE | | |
| | KLCLALIFALKKLRHYMLAHQIQLIARADPIRYV | | |
| | LSQPVLTGRLGKWALLMMEYDITFVPQKAIKG | | |
| | QALAEFLATHPMPDDSPLIANLPDEEIFTAELQE | | |
| | QWELYFDGASRKDINPDGTPRRRAGAGLVFKT | | |
| | PQGGVIYHSFSLLKEECSNNEAEYEALIFGLLLA | | |
| | LSMEVRSLRAHGDSRLIIRQINNIYEVRKPELVP | | |
| | YYTVARRLMDKFEHIEVIHVPRSKNAPADALAK | | |
| | LAAALVFQGDNPAQIVVEERWLLPAVLELIPEE | | |
| | VNIIITNSAEEEDWRQPFLDYFKHGSLPEDPVER | | |
| | RQLQRRLPSYIYKAGVLYKRSYGQEVLLRCVD | | |
| | RSEANRVLQEVHHGVCGGHQSGPKMYHSIRLV | | |
| | GYYWPGIMADCLKTAKTCHGCQIHDNFKHQPP | | |
| | APLHPTVPSWPFDAWGIDVIGLINPPSSRGHRFIL | | |
| | TATDYFSKWAEAVPLREVKSSDVINFLERHIIYR | | |
| | FGVPHRITSDNAKAFKSQKIYRFMEKYKIKWNY | | |
| | STGYYPQANGMAEAFNKTLGKILKKTVDKHRR | | |
| | DWHDRLYEALWAYRVTVRTPTQATPYSLVYG | | |
| | NEAVLPLEIQLPSLRVAIHDELTKDEQIRLRFQEL | | |
| | DAVEEERLGALQNLELYRQNMVRAYDKLVKQ | | |
| | RVFRKGELVLVLRRPIVVTHKMKGKFEPKWEG | | |
| | PYVIEQAYDGGAYQLIDHQGSQPMPPINGRFLK | | |
| | KYFV | | |
| 8084 | TPVDSMSKDPPAEAENGISTTSEPEKDPNAAKSC | AAX95475 | Oryza sativa |
| | PSDKKHEPTRTTSEVTRTWCPIHKTRRHILQTCS | | Japonica Group |
| | VFLDVQAEIRASKERGIQRTSPPRDVYCPIHKAK | | |
| | THDLSSCKVHLSAMRTSPPKVQQSQIYPRDADK | | |
| | EQGATTISDRFVRVIDIDPHEPSILHLLEDQASSS | | |
| | TSTPCDVYAIDGTSTSRDGDAETADQSVTPTPA | | |
| | QHIRILNAILSESPFDPVLNADLDQWTERLRESV | | |
| | ANLSNAFAEAAARAPLEQPPTGGANGEQPEERT | | |
| | PHRQATPPPRGNSDLRDHLNGRREARRTQDNE | | |
| | NRTIEKYDGSTDPEEFLQVYSRVLYVAGADDN | | |
| | ALANYLPTAMKESAQSWLVHLPPYSISSWADL | | |
| | WQQFVTNFQGTYKRHAIEDDLHTLTNMIPEITD | | |
| | ASVIRALKSGVRDHYTTQELATRRITTAHKLFEI | | |
| | VDRCAHTDDALRHKNDKPRTGGEKKPAKDAR | | |
| | LSQARKRVAGVGNGRLKRSPRPECYTIHKSDKH | | |
| | PLETCFVFKKALTKQLALEKGKRGAASKMKWS | | |
| | EQKIEFSEADHLKTAVTPGRYPIVVEPTIQNIKV | | |
| | ARVLIDDGSSINLLFASTLDAMGIPRKQITFDVA | | |
| | EFDAAYNAIIGRTALTKFIAASHYAYQVLKMPG | | |
| | PKGTITIQGNEKLAVQCDKRSLDMVEHTPNTPA | | |
| | TAEPPKKPFDMPGVPREVIKHKLIVRPNAKPVK | | |
| | QKLRRFAPDRKQAIREAIRKWRMCIDFTGLNKA | | |
| | CPKDHFPLPRIDQLVDSTAGFQGALNDQLGHNV | | |
| | EAYVDDIVVKKKTSDSLIDDLRETFDNLRRYRL | | |
| | MLNPKKCTFGVPSGKLLGSLVSERGIEVNPEKIV | | |
| | GHREREIAHKTQGSPEANWMHGGTKQEAEDAF | | |
| | IALKHYLSNPHVLVAPQPNEELFLYIAATPYSPT | | |
| | VTAVSSFPLGEVVRNKDVVGRIAKWVLELSQF | | |
| | NVHFVPQIAIKSQVLADFVADWTMPENKSDSQT | | |
| | DSETWTMAFDGALNSQGPGAGSILTSPSGDQFK | | |
| | HEIHLNFRATNNTAEYEGLLAGIRAAAALGVKR | | |
| | LIVKGDSELVANQVHKDYKCSSPELSKYLAEVR | | |
| | KLEKRFDGIEVRDIYCKDNIEPDDLAWRASRRE | | |
| | PLEPSTFLDVLTKPSVKEANNEEAEKITRQAKIY | | |
| | CMIGNDLYKKASNGVLLKCLWSDDGKHLLLDI | | |
| | HEGICESHAGGRKLRCEACQFHSKHTKLPAQVL | | |
| | QTIPLTWPFSCWGLDILGPFPRGQGGYKFLFVAI | | |
| | DKFTKWTEVTPTGEIKANNAINFIKGIFCKYGLP | | |
| | HRIITDNCSQFISADFQDYCIKLGVKICFASVSHP | | |
| | QSNGQVERENGIVLQGIETRVYDRLMSYDKKW | | |
| | IEELPSILWAVCTTPTTSNKETSFFLVYGSEAML | | |
| | PTELRH | | |
| 8085 | TEKLPPSPGTGVKPPVNKTEAKNPSAEVDPSNIV | ABF96295 | Oryza sativa |
| | PITLDRLTAEQRDELEQMMSNVKNKFMDSFQE | | Japonica Group |
| | TRRETIPMRSARVHLKVTKVLQLAQVTKVTFLK | | |
| | MWADLEKQLHSYFYSGIHEMKLSDLTAIKQRH | | |
| | DESVQDYIQRFREMRNRCYSLSLTDSQLADLAF | | |
| | QVLIAPIKEKFSAQDFESLSHLAQKVTLHEQRFA | | |
| | EAKKNFKKINHVYPYCDSDDEDDDSEVAAAEW | | |
| | VKRKKVIPCQWVKSSGKEERFDFDITKADKIFDI | | |
| | LLREKQIQLPAGHIIPSAEELGKRRYCKWHNSGS | | |
| | HSTNDCKVFRQQIQAAIEGGKIKFDDSKKPMKV | | |
| | DGNPFLVNMVHTSERAADGGSNRKFQVNSARII | | |
| | SKYQRKYDRQQGEYHEEDGGFDPHWDCEFFRF | | |
| | CWNEGMRLPSIEDCPGCSNAGNSSRSYSRAEFE | | |
| | AKQADVDDVEEASAKVVLSPEQAIFEKPEGIEN | | |
| | RHLKPLYINGFANGKPMSKMMVDGGAAVNLM | | |
| | PYATFRKLGRNPNDLIKTNMVLKDFGGNPSETK | | |
| | GVLNVELTVGSPGDRPRPTFISKNLSSEFRTKLIE | | |
| | LLKEYRDCFAWEYYEMPGLSRSVVEHRLPIKPG | | |
| | IRPYQQPPRRCKADMLEVVKAEVKHLYDAGFI | | |
| | HPCRYAEWVSNIVPVIKKNGKVRVYIDDEVVIS | | |
| | KEIEDHIADLRKVFERTRKYGLKMNPTKCAFGK | | |
| | LEPFTPLLRLKADQKFTWGAEQQKALDNIKKYL | | |
| | SSPPVLIPPQKGISFRLYLSAGDKSIGSVLIQELER | | |
| | KERAIFYLSRRLLDAETRYSPVEKLCLCLYFSCT | | |
| | KLRHYLLSNECTVICKADVVKYMLSAPILKGRV | | |
| | GKWIFALTEFDLRYESPKTIKGQAIADFIMDHRD | | |
| | DSIGSVDIVPWTLFFDGSVCTHGCGIGLVIISPRG | | |
| | ASFEFAYTIKPYVTNNQAEYEAVLKGLQLLKEV | | |
| | EADAIEIMGDSLLVISQLAGEYECKNDTLMVYN | | |
| | EKCRELMSGFRLVTLKHVSREQNVEANDLAQG | | |
| | ASGYKPMLKDVEIEVATITADDWRYVVFQYLQ | | |
| | NPSQSASRKLCYKALKYTLLDDELYYRTIHGVL | | |
| | LKYLSADQAMVVMGEIPPYKLVYGHEAVLPWE | | |
| | VRIGSRRTYLQDELTTDEYYNLMADEREDLVQS | | |
| | RLRALAKVTKDKERVARHYNKKVVPKSFSEGE | | |
| | LVWKLILPIGTRDNKFGKWSPNWEGPFQIHKVV | | |
| | SKGAYMLKGLVGKVYGRALNGKYLKKYYPNV | | |
| | WVNL | | |
| 8086 | AAEEGAEPSASVAEDGEAQAPSQPPSAPAPSQPS | ABF96966 | Oryza sativa |
| | SAPATSVQVPNTADVAKAATAARALQTKAEILS | | Japonica Group |
| | TNQLVVPQAAPSQPAAPTALAVVQAQISLDPEA | | |
| | QAEADMEAMRQNMTRLQDMLRQMQEQQQAY | | |
| | EVTRWTKATSAPILQYSAGYAPPQVRPQVVTQP | | |
| | SPPLAAQPPVYFAGQHQPSGQATQTVAEGASAL | | |
| | QAQLQVFHRQLNQPHYISSTTPSAHPVPTIRQQV | | |
| | PTRGFGTNQAPIQAAMTWLQPIFDPSMAAQQVP | | |
| | PVGAGQPNAMAQLHAQAAISPFATPYPQQGAV | | |
| | NRAGGEKGLPLSGGIKTRPIPPQFKFPPVPRYSG | | |
| | ETDPKEFLSIYESAIEAAHGDENTKAKVIHLALD | | |
| | GIARSWYFNLPANSIYSWEQLRDVFVLNFRGTY | | |
| | EEPKTQQHLLGIRQRPGESIREYMRRFSQARCQ | | |
| | VQDIIEASVINAASAGLLEGELTRKIANKEPQTL | | |
| | EHLLRIIDGFARGEEDSKRRQAIQAEYDKASVA | | |
| | TAQAQAQVQIAEPPPLSVRQSQSAIQGQPPRQG | | |
| | QAPMTWRKFRTDRAGKAVMAVEEVQTLRKEF | | |
| | DALQASNHQQPARKKVRKDLYYTFHGRSSHTT | | |
| | EQCRNIRQRGNAQDPRLQQGTTVEAPREAVQE | | |
| | QTPPVEQRQDVQQRMGLPTQALTPAPTSLRGFG | | |
| | GEAVQVLGQTLLLIAFSSVENRREEQILFDVVNI | | |
| | PYNYNAIFGRATLNKFKAISHHNYLKLKMPGPK | | |
| | GVIVVKGLQPSAASKRDLAIINRAVHNVETEPH | | |
| | ERPKHTPKPTPHGKVAKVQIDDFDPTKLVSLRS | | |
| | PRLKLRKMSADRQEAAKAEIHMNPLNIPKTSFV | | |
| | TPFGTFCQLRMPFGLRNAGATFARLVYKVLGK | | |
| | QLGRNVKAYVDDIVVKIHKAFDHANNLQETFD | | |
| | SLRAAGIKLNPEKCVFSVRAGKLLGFLVSERGIE | | |
| | ANPEKIDAIQQMKPPSSVHEVQKLAGRIAALSRF | | |
| | LSKAAERGLPFFKTLRGAGKFNWTPECQAAFD | | |
| | KLKQYLQSPPVLISPPLGSELLLYLAASPVAVSA | | |
| | ALVQETESGQKPVYFVSEALQGAKTRYIEMEKL | | |
| | AYALVMASRKLKHYFQAHKVIVPSQYPLGEILR | | |
| | GKEVTGRLSKWAAELSPFDLHFVARSAIKSQVL | | |
| | ADTTEYEAILLGLRKAKALGVRRLLIRTDSKLV | | |
| | AGHVDQSFEAKEEGMKRYLEAVRSMEKCFTGI | | |
| | MVEHLPRDQNEEADALAKSAACGGPHSPGIFFE | | |
| | VLHTPSVPMDSSEVMVIDQEKLGEDPYDWRTPF | | |
| | VKHLETGWLPVDEAEAKRLQLRATKYKMVSG | | |
| | QLYRSGVLQPLLRCISFAKGEEMAKEIHQGLCG | | |
| | AHQAARTVASKGLDIIGPFPVARNGYKFAIVAV | | |
| | EYFSRWIEAEPLGAITSAAVQKFVWKNIVCRFG | | |
| | VPKEFITDNGKQFDSDKFREMCEGLNLEIRFVSV | | |
| | AHPQSNGAAERANGKILEALKKRLEGAAKGKW | | |
| | PEELLSVLWALRTTPTRPTKFSPFMLLYGDEAM | | |
| | TPAELGANSPRVMFSEGEEGREESLELLEGVRV | | |
| | EALEHMHKYTTSTSATYNKKV | | |
| 8087 | KEQFGLRPKDAGNLYRQPYPEWFERVPLPNRFK | ABA93011 | Oryza sativa |
| | VPDFSKFSGQDSTSTYEHISQFLAQCGEASAVD | | Japonica Group |
| | ALRGMIAPIMEKFSSEDFESLSHLTQKVTLHEQ | | |
| | WFAEARRNSRKVNHVCPYLCGSDDEDDDSEIA | | |
| | VAEWVRSKKVVPCQWVKNSGKEERYEFDITKA | | |
| | DKIFDLLLREKQIQLLAGHTIPSVEELGKKRYCK | | |
| | WHNSGSHTTNDCKVFRQQIQAAIEGGKIKFDDS | | |
| | KRPMKVDGNPFPVNMVHTTGRIADGVRTRGFQ | | |
| | VNSAKIINKYQRKYDKQQEKHYEEDDDGFDPH | | |
| | WGVSLLRIRKKVSKIEKPERFQEVEQEINYRLKR | | |
| | TKPKQEWRVKKQAPVADEAAVDAAKRLAKGK | | |
| | SVVIASVNMVFTLLAEFGVKQADVDEVEEESA | | |
| | KLFLSPEQAVFEKPEGTENRHLKPLYINGYVNG | | |
| | KPMSKMMVDGGAAVNLMPYATFRKLGRNTED | | |
| | LIKTNMVLKDFSGNPSDIKGVLNVELTLGNKTIP | | |
| | TSFFVIDGKGSYSFLLGRDWIHANCCIPSTMHQC | | |
| | LIQWQADKIEIVPADRSVNDCLSGKFWDGDFLK | | |
| | VFDFDIQPVEDGEPKLLFWGRRVYTKDTIDDLD | | |
| | DKQRQGFMSADDLEEIDIGPGDRPKPTFISKNLS | | |
| | AEFRTKLIELLKEFRDCFAWEYYEMPGLSRSIVE | | |
| | HRLPIKPGVRPHQQPPRRRKADMLEPVKAEIKR | | |
| | LYDAGYNQIFMAEEDIHKTAFRCPGAIGLFEWV | | |
| | VMTFGLKSAGAMYQRAMNYIYHDSIGWLVEV | | |
| | YIDDVVVKSKEIGDHIANLRKFLRFLVHERGIEV | | |
| | TQRSVNAIKKIQPPENKTKLQEMIGKINFVRRFIS | | |
| | NLLGRLRHYLLSNECTVICKADVVKYMLSAPIL | | |
| | KGRVGKWIFSLTESDLRYESPKAIKGQAVADFI | | |
| | VEHHDDSIGSVEIVLWTFFFDGSVCTHGYGIGL | | |
| | VIISPRGACFEFAYTIKPYATNNQAEYEADLKGL | | |
| | QLLNQLAGEYECKNDTLMIYNEKCQELLKEFRL | | |
| | VTLRHVSREQNTEANDLAQGASGYKPMIKNVE | | |
| | VEVATITADDWRYDVHQYLQDPSQSASRKLRY | | |
| | KALKYTLFDDELYYRMVDGVLLKCLSADQAK | | |
| | VAIGEVHEGICGTHQSAHKMKWLLRRAGYFWP | | |
| | TMLEDCFRYYKGCQYCQKFGAIQRAPVSAMNP | | |
| | IIKPWPFRGWGIDMIGIINPPSSKGHKFMLVATD | | |
| | YFTKWVEAIPLKKADSGDAIQFVQEHIIYRFGIP | | |
| | QTMTTDQGSIFVSDEFVQFADSMGIKLLNSSPYL | | |
| | CTS | | |
| 8088 | DYLEQENRVLREEMTAMQTRMDEMAELIKTM | ABE77575 | Medicago |
| | AEAQTQAQAQIQAQAQALAQAQTQAQTLTEAQ | | truncatula |
| | ARSQAPPPPPPVRTQAEASSSWTLCADTPTQSAP | | |
| | QRSTPWFPPFTAGEIFRPITCEAQMPTHQYTAQT | | |
| | PLPAMRVTPATMTYSAPVIHTIPQTEEPIFHSGN | | |
| | AEAYEEVSDLRAKYDELRRDMKALHEKGKFG | | |
| | KTAYDLCLVPSVQVPHKFKIPDFEKYKGSSCPE | | |
| | EHLKMYVRRMPAYAQDDQILIYYFQESLTGPAS | | |
| | KWYTNLDKTRVQTFRDLCEAFVEQYSYNVDM | | |
| | TPDRSDLQAMTQGDKETFKEYAQRWRDTAAQ | | |
| | VSPRIEEKEMTKLFLKTLNHFYYKKMVGSTPKS | | |
| | FAEMVGMGVQLEEGVREGRLVKNTTPASGTKK | | |
| | TGNHFPRKKEQEVGMVTHGGPQQTYPAYQHIA | | |
| | AITPTSHPFQQTNNHPQIPQYPQMPQYPQIPQYP | | |
| | QFPQNPSPQNTQQQNIQQQNFQQQPYQQYPYQ | | |
| | QYPQQYFQQQPYQQRPQQPRPPRMPINPIPVTY | | |
| | AELLPGLLKKNLVQNRTAPPIPEKLPSWYRLDQ | | |
| | TCDFHEGGRCHNIETCYAFKSAVQRLINDGKITF | | |
| | TDSAPNVQTNPLPNHGAATVNMIENCQKTRPIL | | |
| | NVQHIRTPLVPLHAKLCKVDLFEHDHDLCEICL | | |
| | MNSGGCQKVRNDIQGLLDRGELVVERKSDDVC | | |
| | VITPEGPLEVFYDSRKSTITPLVICLPGPLPYASE | | |
| | KAIPYKYNATMIEEGREVPIPPLSSVDNIVEDSR | | |
| | VLRNGRVVPIVFPKRIDATTNKELRTKDADVAK | | |
| | EVDQPKEAGTSAEFDEILKLIKKSEYKVVDQLM | | |
| | QTPSKISIMSLLLNSEAHKDALMKVLEQAFVDY | | |
| | DVTVGQFGGIVGNITACNNLSFSDEELPAEGRN | | |
| | HNRALHISVNCKTDALSNVLVDTGSSLNVLSKT | | |
| | TYTQLAYQGAPLRRSGVMVKAFDGSRKDVLGE | | |
| | VILPITVGPQVFQVNFQVMDIQASYSCLLGRPWI | | |
| | HEAGAVTSTLHQKLKFVKNGKLVTVNGEEALL | | |
| | VSHLSSFSFIGADDVEGTPFQGFTIEDKNAKRNE | | |
| | ASISSLRDAQKVIQAGGSTSWGKLIELPENKHRE | | |
| | GLGFFPSTGLSTAKKGTFHSSGFIHAIIEDDPESV | | |
| | PRGFITPGVSSHNWVAVDVPFVAHLSKLEIDEP | | |
| | VEQHNPMISPNFEFPVYKAEEEENEEIPDEISRLL | | |
| | EQERKTIQPYGDELEVINLGTKEDKKEIKVGASL | | |
| | ETSVKKQVIELLKEYVDVFAWSYRDMPGLDTDI | | |
| | VVHHLPLKPECPPVKQKLRRTRPDMALKIKEEV | | |
| | QKQIDAGFLVTSNYPQWLANIVPVPKKDGKVR | | |
| | MCVDYRDLNKASPKDDFPLPHIDVLVDSTAKS | | |
| | KVFSFMDGFFGYNQIKMAPEDREKTSFITPWGT | | |
| | FCYKVMPFGLINAGATYQRGMTTLFHDMIHKEI | | |
| | EVYVDDMIVKSITEEDHVKYLQKMFQRLRKYK | | |
| | LRLNPNKCTFGVRSGKLLGFIVSQKGIEVDPDK | | |
| | VKAIREMPAPRTEKEVRGFLGRLNYISRFISHMT | | |
| | ATCGPIFKLLRKEQGIVWTEDCQKAFDNIKKYL | | |
| | LEPPILIPPIEGRPLIMYLTVLENSMGCVLGQQDE | | |
| | TGRKEHAIYYLSKKFTECESRYSILEKTCCALA | | |
| | WAAKRLRHYMINHTTWLVSKMDPIKYIFEKPA | | |
| | LTGRIARWQMLLSEYDIEYRSQKAIKGSILADHL | | |
| | AHQPLEDYRPIKFDFPDEEIMYLKMKDCDEPLF | | |
| | GEGPDPDSVWGLIFDGAVNVYGNGIGAVLLTP | | |
| | KGTHIPFTARLRFDCTNNIAEYEACIMGIEEAIDL | | |
| | RIKNIEIYGDSALVINQIKGKWETLHAGLIPYRD | | |
| | YARRLLTFFNKVELHHIPRDENQMADALATLSS | | |
| | MIKVNHHNDVPLISVKFLDRPAYVFAAEAVFDD | | |
| | KPWFHDIKVFLQTREYPPGASNKDKKTLRRLSS | | |
| | NFFLNGDILYKRNFDTVLLRCVDKYEADLLIHEI | | |
| | HEGSFGIHPNGHTMAKKILRAGYYWMTMESDC | | |
| | YKHTRKCHKCQIYADKIHMPPTTLNLLSSPWPF | | |
| | SMWGIDMIGRIEPKASNGHRFILVAIDYFTKWV | | |
| | EAASYANVTKQVVVKFIKNHIIYRYGIPNRIITD | | |
| | NGTNLNNKMMKELCDDFKIEHHNSSPYRPQMN | | |
| | GAVEAANKNIKRIVQKMVVTYKDWHEMLPFA | | |
| | LHGYRTSVRTSTGATPFSLVYGMEAVLPVEVEI | | |
| | PSLRVLMEADLSEAEWVQNRYDQLNLIEEKRM | | |
| | TALCHGQLYQKRMKQAFDKKVRPREFKEGDL | | |
| | VLKKIFSFQPDSRGKWAPNYEGPYVVKRAFSGG | | |
| | AMTLQTMDGEELPRPVNIDAVKKYFV | | |
| 8089 | TKQSSSKTEVEPTNVIPITLDDFEGEDCKSMKEY | AAM19047 | Oryza sativa |
| | IKEITQEALMRACTRTRQGMIIKPGPRPKLTLDL | | Japonica Group |
| | VSNEEVTQSIQQQVASTIDSSMIIFKNKLDATIEG | | |
| | RFDEFLRTKFGPLMADFMLKDKASTSASQAPID | | |
| | QTSRRTDGAAQTAGPTGPDGRSDRILPRRLDRD | | |
| | SGRSDRASGRRSDRALDRTFDSPVSTVATNSQV | | |
| | PPHVPNAYNDVARGYPPDTRQGQYNHITPQTQP | | |
| | IRPPNPPPNQHRPDNMEEIISGIIRDKFGIEARNR | | |
| | AKVYQKPYPDYYDNVPFPRGYRVPEFTKFSGE | | |
| | DSRTTWEHRFRDVRNRCYSLNITDRDLAGLTEN | | |
| | GLIAPLRERLDGQQFLDVSQLMQKALAQESRV | | |
| | KDNKKFVRPYEKKPNVNLIDYPEASDSEGEGDH | | |
| | DMYVAEWSWTNKNKPFVCSNLMPTPRKDWQS | | |
| | EVQSAIDEGRLKFTDSSKMKLDHDPFPVNTINF | | |
| | NDKKMLIRPEQAESTKGKGVVIGEPRPKMIVPK | | |
| | KPENRANEEKREGKRITVEARTSEVITIKVGSHD | | |
| | VPIPSGDEVGESSSNKPKAGTSSSQSAGLTRPSG | | |
| | RSDRSHTAGLTGPSGQSDRRPNDGPTDAPGRSD | | |
| | SRHHVGPTGAPGRSDRWSKSGLTGLQHRFDGR | | |
| | FTKGSAGTSSSSSRPNRGHYLPPGTEPKPRRFNE | | |
| | LRPPPVWRRKSVEKEEPIVVEKKEKQSVDKDES | | |
| | SLKEDMDINMVCMLPMEFCAVDEAEVAQFSLG | | |
| | PKDAVFEKPDESNRHMKPLYLKGHIDGKPVSR | | |
| | MLVDGGAAVNLMLYSLFKKMGRGVDELKKTN | | |
| | MILNGFNDEPTEAKGIFSVELTVGNKTLPTAFFI | | |
| | VDVQDFDKVEKLGQGFTSADPLKEVDIGNGTK | | |
| | PRPTFVNKNMRADYKVKIIKLLKEYVDCFAWK | | |
| | YHEMPGLSRELVEHRLPIKPGFRPYKQPPRHFNP | | |
| | LLYDRVKEEIDRLLKAGFIRPCRYAEWVSSIVSV | | |
| | EKKGSGKIRVCIDFRDLNKATPKDEYPMPIADM | | |
| | MINDASGHKNAGATYQRAMNLIFHDLLGIILEI | | |
| | YIDDIVVKSDGMEGHIADLRLAFERMRQYGLK | | |
| | MNPLKCAFGVSAGRFLGFMVHERGVEIYPKKIE | | |
| | KIRDFKAPICKKEVQKLLGMVNYLRRFIFNLAG | | |
| | KIDAFVPILHLKKEADFTWGAKQQEAFEELKRY | | |
| | LSTPPVVRAPKAGKPIRLYIASEDKVIGAVLTQE | | |
| | EDGKVYIITYLSRHLLDAETRPILSGRIGKWAYA | | |
| | LIKYDLAYEPLKSMRGQIACDFIVDHHVDIAYE | | |
| | EDVCLVEVIPWKIYFDGSSCKEGQGIGVVLFSPN | | |
| | GMCYEASVRLEYYCTNNQAEYNALLFDLQVM | | |
| | EMVGAKYVEAFGDSELVVQQVAEVYKCLDGS | | |
| | LNRYLDSCLDIIANFDNFAIRHIARHDNSRANDL | | |
| | AQQASGYDVKKGLFLLFEEPMLDFKFLCEIGEI | | |
| | GDQGRSDRRCAAGLTGDQVQSDRPHAADLTG | | |
| | DPGRSDRPCMAGLTGSGQGAGGHATINLEAKLI | | |
| | VNSDICAQETEEDWRIPLIRYLKDPTLKVDWKIR | | |
| | RQAFKYTLLDEDLYRQNIDDVLLKCLDEDQSK | | |
| | VAMGEGHRFVLVAMDYFTKWAEVVPLKNMT | | |
| | HTEIIDFILKHIIHRFGIPQTLTMDQAKSSNKTLL | | |
| | KLIKKKIEEHPKRWHEVLSEALWAHRISKHGAT | | |
| | KVTPFELVYGQEAILPVEVNLGSLRYIKQDDLS | | |
| | GEDYKTLMGDNLDEVIDKRLKALEEIENEKKR | | |
| | VAKAYNKRVKVKLFQVGDLVWKTILSLGTRFR | | |
| | EFDSRYSSKRQRGMCLHPNLASKVKIGKVAKI | | |
| | WKSTGFLRVGRSDRRVLGGQTAG | | |
| 8090 | QHYHDTIQQENQLIPSFFTYIAKLKQDLDSLPDE | XP_0012490 | Coccidioides |
| | FFHKRRSKVKDYPQTKKTPVKPLPKISEEEHKQ | 02 | immitis RS |
| | QIDEELCLRCGQPGHKTKFCTNSSNKSQQTDKK | | |
| | NKNQAKTRTAKPMQDPGQTLERQGVNPIKKAS | | |
| | RCKQAALLDSGTTVNSISYKLASQLDWDQPETP | | |
| | MEVIEMLNRAEADWYSIYKTQLTITDSMGTIKM | | |
| | KKYYCPSRQRFYKNDILIFSASEKEHEKHVRLV | | |
| | MEYLREYQLFAKLAKCAFKRQTISYLGYIIDNE | | |
| | GIKMDPKQIQVITEWLLLQSFHNIQIFLGFANFY | | |
| | QRFIQKYSVIVALLTDLLKSSEKRRKKEPFLLTP | | |
| | TTRKVFCELQAVFFREPVIQHYNPECRIHLETDT | | |
| | SEHAAEMVQGRPGGTKIIDVLNLLLEAQGDDSS | | |
| | VQARFTKTESQQSE | | |
| 8091 | NSSDSTNNTSPHSSATCSTAPTTSSVPAVTFLPTP | XP_502848 | Yarrowia |
| | QSPDFSHEHARYLNWLRSIYPVHTIPIFTGDAVL | | lipolytica |
| | VSQNAQLAHDWLIAVENFLCTFPVPHHARPHLL | | CLIB122 |
| | GSRLFGSAGLWWRQSMAKNILSNWHEFKSNFA | | |
| | SYWCPEFNSQTESHFFHKVRQGVAETAAEFAQ | | |
| | RRLQVGKMAGVPKTYHVSLRRSRKLIYDPDNQ | | |
| | VYLCMVKPRRDSEAVSREELELISKNKDIVVNT | | |
| | PPDLAKSPFCVNYGLCRHETEFVEYHVNRMLEE | | |
| | GLVDPTQSVYGAPVLIIISKDGEFRMCTDHRILD | | |
| | DRSINDRFWLPKTDEILSQIGHNGVFSKLHLFSG | | |
| | YYQAFKKPTGLSNNVISIFPLDLREDRDNHLGLS | | |
| | EVLDQLGGCLSGVAFDEFDNLIVCSKDRETHTA | | |
| | DLDNVLRVLRQRHIYVNKYQSDMFKSSLELLG | | |
| | HIVDKQTCRPDPLKVCTIVNWRAPLNTTDTASF | | |
| | LHLAGYYRRYIPDFALVARPMALLCGGNKPFD | | |
| | WTEKCQSAFDLIKTTLVRAAPVRLETLRGAYRL | | |
| | STEIFETCFSVVLEQQDASGMFHVVDRKSARFH | | |
| | GLELRFTEYEKNVKAIVYALRKWRIGHGLFLIQ | | |
| | TRFPLSRDIILNPAYLKGSSLSRWLHFIHAHQFE | | |
| | VADISQNKMQKNGTDGLKRGVEVDGKMGVDN | | |
| | VVDSGANSLAKRVCVEN | | |
| 8089 | TKQSSSKTEVEPTNVIPITLDDFEGEDCKSMKEY | AAM19047 | Oryza sativa |
| | IKEITQEALMRACTRTRQGMIIKPGPRPKLTLDL | | Japonica Group |
| | VSNEEVTQSIQQQVASTIDSSMIIFKNKLDATIEG | | |
| | RFDEFLRTKFGPLMADFMLKDKASTSASQAPID | | |
| | QTSRRTDGAAQTAGPTGPDGRSDRILPRRLDRD | | |
| | SGRSDRASGRRSDRALDRTFDSPVSTVATNSQV | | |
| | PPHVPNAYNDVARGYPPDTRQGQYNHITPQTQP | | |
| | IRPPNPPPNQHRPDNMEEIISGIIRDKFGIEARNR | | |
| | AKVYQKPYPDYYDNVPFPRGYRVPEFTKFSGE | | |
| | DSRTTWEHRFRDVRNRCYSLNITDRDLAGLTEN | | |
| | GLIAPLRERLDGQQFLDVSQLMQKALAQESRV | | |
| | KDNKKFVRPYEKKPNVNLIDYPEASDSEGEGDH | | |
| | DMYVAEWSWTNKNKPFVCSNLMPTPRKDWQS | | |
| | EVQSAIDEGRLKFTDSSKMKLDHDPFPVNTINF | | |
| | NDKKMLIRPEQAESTKGKGVVIGEPRPKMIVPK | | |
| | KPENRANEEKREGKRITVEARTSEVITIKVGSHD | | |
| | VPIPSGDEVGESSSNKPKAGTSSSQSAGLTRPSG | | |
| | RSDRSHTAGLTGPSGQSDRRPNDGPTDAPGRSD | | |
| | SRHHVGPTGAPGRSDRWSKSGLTGLQHRFDGR | | |
| | FTKGSAGTSSSSSRPNRGHYLPPGTEPKPRRFNE | | |
| | LRPPPVWRRKSVEKEEPIVVEKKEKQSVDKDES | | |
| | SLKEDMDINMVCMLPMEFCAVDEAEVAQFSLG | | |
| | PKDAVFEKPDESNRHMKPLYLKGHIDGKPVSR | | |
| | MLVDGGAAVNLMLYSLFKKMGRGVDELKKTN | | |
| | MILNGFNDEPTEAKGIFSVELTVGNKTLPTAFFI | | |
| | VDVQDFDKVEKLGQGFTSADPLKEVDIGNGTK | | |
| | PRPTFVNKNMRADYKVKIIKLLKEYVDCFAWK | | |
| | YHEMPGLSRELVEHRLPIKPGFRPYKQPPRHFNP | | |
| | LLYDRVKEEIDRLLKAGFIRPCRYAEWVSSIVSV | | |
| | EKKGSGKIRVCIDFRDLNKATPKDEYPMPIADM | | |
| | MINDASGHKNAGATYQRAMNLIFHDLLGIILEI | | |
| | YIDDIVVKSDGMEGHIADLRLAFERMRQYGLK | | |
| | MNPLKCAFGVSAGRFLGFMVHERGVEIYPKKIE | | |
| | KIRDFKAPICKKEVQKLLGMVNYLRRFIFNLAG | | |
| | KIDAFVPILHLKKEADFTWGAKQQEAFEELKRY | | |
| | LSTPPVVRAPKAGKPIRLYIASEDKVIGAVLTQE | | |
| | EDGKVYIITYLSRHLLDAETRPILSGRIGKWAYA | | |
| | LIKYDLAYEPLKSMRGQIACDFIVDHHVDIAYE | | |
| | EDVCLVEVIPWKIYFDGSSCKEGQGIGVVLFSPN | | |
| | GMCYEASVRLEYYCTNNQAEYNALLFDLQVM | | |
| | EMVGAKYVEAFGDSELVVQQVAEVYKCLDGS | | |
| | LNRYLDSCLDIIANFDNFAIRHIARHDNSRANDL | | |
| | AQQASGYDVKKGLFLLFEEPMLDFKFLCEIGEI | | |
| | GDQGRSDRRCAAGLTGDQVQSDRPHAADLTG | | |
| | DPGRSDRPCMAGLTGSGQGAGGHATINLEAKLI | | |
| | VNSDICAQETEEDWRIPLIRYLKDPTLKVDWKIR | | |
| | RQAFKYTLLDEDLYRQNIDDVLLKCLDEDQSK | | |
| | VAMGEGHRFVLVAMDYFTKWAEVVPLKNMT | | |
| | HTEIIDFILKHIIHRFGIPQTLTMDQAKSSNKTLL | | |
| | KLIKKKIEEHPKRWHEVLSEALWAHRISKHGAT | | |
| | KVTPFELVYGQEAILPVEVNLGSLRYIKQDDLS | | |
| | GEDYKTLMGDNLDEVIDKRLKALEEIENEKKR | | |
| | VAKAYNKRVKVKLFQVGDLVWKTILSLGTRFR | | |
| | EFDSRYSSKRQRGMCLHPNLASKVKIGKVAKI | | |
| | WKSTGFLRVGRSDRRVLGGQTAG | | |
| 8092 | HLPSATLDANPRMFKPRLYRVSPCDRQAIDLVF | CAJ41904 | Ustilago hordei |
| | DELTWQGHLTTAPPGTPCSWPVFVVYHEGKPC | | |
| | PVVDLRQLNDVVDPDVYPLPTPDKLREKLAGA | | |
| | KYITMFDLCKAFYQMLLHPDDHWKATVLTHC | | |
| | GQETLSCTIMGQSHSVSFLQQVLTEAFKVDRLS | | |
| | TMAFVYVDDFGVHSNSLDEHMDHIHTVLGVIQ | | |
| | TLGLTLAQDKAHVACKEVPLLGHLVSRQGTRT | | |
| | MPSKCEAIKSIPYPAMLNQLEHMVGFFSYYKNY | | |
| | VPHFSALIAPLQHLKTTLLRLSPKTRQARKCYCT | | |
| | GMSVPDDTSTRQSLTKLKTILQDWALQFPDYSQ | | |
| | PFLLYVDTSQQHGFALALHQNHQDSGIGDSIQCI | | |
| | DAIHLNSTDASAKAPVWFDSHALKPAEKSYWP | | |
| | TELEAAAAVWALFRMKRFLDALPGPHLLFTDH | | |
| | LAVTSIADAKPFSSTPAARNPRLVRFTLILAEFCP | | |
| | KLWILHRKGIYMAHVDALSRIQASETELASFHA | | |
| | HELIIDPGLIAHILQSQQSDSMLQLLHQELTATG | | |
| | KGTLPFDNGSFGLNADNILCRITPSGVWKPCIGT | | |
| | AALPRIIGLVHTGHLGTKATFDRFRAVAYAPHL | | |
| | LCHVEDFVKCCTQCQQMRTLHHWPYGSLQPLP | | |
| | APDTPFTTISCDFIVCLPLACTLFDLDPVDTVLIL | | |
| | TDTATCRIYLLSSTTTWSTERWSLRYVEQLLPH | | |
| | VGWPKKIISDRDLQLTSQFWCSLNTCYSCELIFS | | |
| | TAHHKSNGQSKRAIQSVELLLRGLCNAWSDDW | | |
| | ADHLPLVELLLGNRPNASMNAAPNDLLYGLRL | | |
| | HDPFTMLQLVMSLSDLTLLDCCLALCQQALDH | | |
| | LALVQAYMHQWYNSLHTPPPKLAISDWVWLEL | | |
| | HDGYLLPPSFLPPDQRLGIQHIGPYPIKHMVSNL | | |
| | AYEISLPLESHLHPVISIQHLEPYMPSDKPITTSLV | | |
| | TEILKEHKTHCCSKQYLVCFEHASCDKWVLENT | | |
| | VTNPAILEQWHLRRPLLPPSASPD | | |
| 8093 | TGDFYKRAFWKRTILNPGLRHRSSRLNYRVTHL | EAQ91761 | Chaetomium |
| | DEACGDRWAETPDDVDRNYQWQWDGYPYPQ | | globosum |
| | LLPVAQNGWLKIREPATPLRQTVPHLARIRRAIS | | CBS148.51 |
| | PRIGSCQPLRHTRHLQHHQQSDDPMPTPAVDRQ | | |
| | LRARQLLRFVGTDHPHVTHVDRKDIDHARSFYS | | |
| | WFKKWRPVTTTSTPSISSVGSNNHHQAVTTDCP | | |
| | SERNNQPVETASNASEEISTPTLYTHASSTRPSSP | | |
| | TPTTSDLPSTGNTPKTSTYRRSTSTDNNVDMAD | | |
| | NGRRQPVPDPDGPLTAQAAAALMAAAFRQHRE | | |
| | NQNADMGNLLAAAIDHQQRQQPAASTALQAV | | |
| | DVGYFDPSAKDPSGAGLISGGKINKYTDIFPFCD | | |
| | RLVDLAATHGDDAVRRIWSQCLQGPALVWHS | | |
| | HILTDDDRELLRTATINAICNKLKSRFKIDYSVA | | |
| | LDTLKQSRFTMSDVANDKDIMAFVQTMMRNA | | |
| | KACDMSRHGQLIAAFEALDGDIQSELDKPTSTT | | |
| | EIDSFLRQIQERESVLRKRAQRFRQPQQPYRQHH | | |
| | IGIRGNNNNSHSGTVINNNGINHKAKIRGQGLQP | | |
| | QGQQWQYNQYNVGNQPANNQRQYGQQQQQA | | |
| | QQPGAVVPENRRLPAPPQRNQYRPPTPGRAIPA | | |
| | FHGSAQYQQPSVEDAPEQDVAGPDDFGPAESY | | |
| | YGNAPYPDDEYPAAPEWLDVDHRGPDTDTTDT | | |
| | PDDVVAQFVSLSIASKCRHCAKSFPSNNKLMAH | | |
| | IYADHLKRPRPDRKARADTAGAIPSAREVVDAH | | |
| | LAEAHPVADDPMHLSKIVESKNHPRPRSRLYRN | | |
| | VGRQAMVGRPHTVIRHRASPLMVRGIGKGVHN | | |
| | TLDYAIIDLNFYGTLPSGSTAIASFTREVTIVDDL | | |
| | RANMLLGMDCMTPEKFDILLSDEAIVINSCGGIR | | |
| | IPITTKRHGKPIKSKVIAKHRISIPPQTLASIAVNH | | |
| | AVHVDDGQTLLFEPATLNVSVFAAVADCHMES | | |
| | AIVRNDTNRPITVHANQCVGHLVSMEPDCQAY | | |
| | LVDDAAAAELAVHKPAPPPEERRLATMTEDDIK | | |
| | LNTIQHPCGVTIYNLPPAQMAPLWSLVTEYQDV | | |
| | FKDKGFVNLDQDQWMRVKLRPGWHETLPKKC | | |
| | RIYPMNAEDRGVVKDTIGKLESGGKATKTRFQ | | |
| | VPFSFPVFVVWRTMPDGTRKGRMVVDIRMLNK | | |
| | IVLPDAYPMKSQDDIMARLANAKYITILDAVAF | | |
| | YYQWLVDPRDRWVFTMNTPEGQYTFNCVVMG | | |
| | YRNSNAYVQRQMNLLLKHIDAADAYCDDVAIG | | |
| | SRKFDTDDGHLAHLRRVFDALRRRNISIGPSKSF | | |
| | IAFPSATVLGRMVNSMGMSTTTERLSAITKLNFP | | |
| | ATLKDLEYFIGATGWLRHNVPLYSILVEPLQRR | | |
| | KTALLKTRNRKGKRRSWSHAVQLLLPTSEELAS | | |
| | FEAVKAALSRHTTLAFFRDADPFCIDVDVSALGI | | |
| | GAEVYHIEPAALQKVTKDGLIVKYPPRTAIQPL | | |
| | AYLSRTLSLAERDYWPTEMEVLGLVWVLAKCK | | |
| | RWITATKSSPLYVFTDHKSILGLNNRTADITSST | | |
| | STTNKRLIRAAEFFSTFDLRIQHKPGKFHVVADA | | |
| | LSRLPSTNNVTDPQAPGGLDNLPNDREEHWAFC | | |
| | AATAPLRLPSIRTFPEPADKDVDLGQPTATTTSG | | |
| | IVTLDIHPEFVERLQEGYLQDPVWKRTMTVIRQ | | |
| | NNSLLPANRANLPFELHKGLLWKTGGQVPRLC | | |
| | VPRTCLTDILNAIHDGNHRGFQALRTRLSNFCIS | | |
| | QPTKMLRAYVNACPQCKANDRRHHSPYGSLQP | | |
| | LTGNECPYYMITIDFIVDLPTSTDKLDVALVIVD | | |
| | KLSKETQIVLGKSTWKSSHWGPQLLNRLLTAN | | |
| | WGLPKVILSDRDPKFTAALWRAIWKTLGTNLL | | |
| | YTTAYHPSTDGQSERTIQTIESALRHYIQALDDF | | |
| | TRWPETVPRLQFEHNNIRSRTTGKSPNEIVKGFN | | |
| | PVAVADVIGDHQPARDPNLPQLRMEAHDAVAI | | |
| | AAMTMKHYYDRRHMPRFFDVGSKVWLRVHK | | |
| | GYNMPATDLIGPKFSQQYAGPLEVVERVGRSA | | |
| | YRLRLPPSWRIHDVVSIDHLEPHTFDPYGRQLPA | | |
| | IQPVTTHNQTVKAIVSHRLRGNGNQYLVKYDG | | |
| | LGAEFDQWLPEQRLASIAPGILQQWLQQQQHH | | |
| | K | | |
| 8094 | PAITQYDPALPLFQPIGRTNNNITINPIACPVYRK | EAU82224.2 | Coprinopsis |
| | LSHDDFLLAVDANGTETACIRQETAVSLWTTLK | | cinerea okayama |
| | DIGLAINKAGNPGRNEAVHLLNQYYEIPHYKFD | | 7#130 |
| | RLGLQRPLILDLVRPNLHNIFNPLYAWGPKEYL | | |
| | TKTYQALQIVGRVALRWIDDAKKVCQELGPDC | | |
| | GWDWEEGNEIEEEAPPMPIQAHPLNPYNDLTTR | | |
| | DPRVRPYPARQEIRNSTNRDLILHPTASSAARAN | | |
| | MQIVVHPNRSNAARANNSVTIYRRGNRMARAS | | |
| | AYSTDGSEYVIRNGKQTNTNF | | |
| 8083 | LHDDLQRGPSIIKNTPPPFVIQFGSLPPVTFFEYG | >BAB08213.2_2 | [Oryza sativa |
| | SKVYMQQAQDVTQFQEAQSKKQRKRASAKAK | | Japonica Group] |
| | KERRTLMLEARTLLKESVVAEIKGDIQAAQKLR | | |
| | VKASNRRSITASLRAPDPVATPKLPTPTVQHTEV | | |
| | ELLEALEAVSDNLRRHISHTRRANSPHPLRNYR | | |
| | RKYRKVQRLHQLVSSRIAQSSLLEEDWSLDTSV | | |
| | LIKKVFKFPSILEPPYDLFPDEWACEPTKIKEKVR | | |
| | CAIMKEYWKRRDREHLVLPGSTIFVDYNTYTPR | | |
| | QQSTWESCLHLSAVGGSSDYNNNRFAVLRSEA | | |
| | PAPRSEDLRQELRELQDRMAQLGRRLQDHEAP | | |
| | RSSSTQAGGRSRRYQPSYHPQHDRRTLAPRRTL | | |
| | PSTQVMHQRQTALPPRWNRWSRHQDYPTSSRL | | |
| | AQEWRVREAPSSQVPPHVPSSPRREVYTQRRRE | | |
| | TNAPNPATRQVAPPLLPTPSIPPRRQHAPTENQR | | |
| | KRERRRNNRYALYRELEDLVLKHTQVRVRPDG | | |
| | EVHQEDERIVFRISPSLERDARYNYLIARLTPKP | | |
| | RRTLDVADKNREQALTQPCPVTILQRGKGPVQ | | |
| | ATLGISLSTSARQSKENQSTPMEGVEQTPVEQV | | |
| | DKASRQEEAIINPMVDVLPQQESSSVPPARVEQ | | |
| | VAGSKNIEDPKESIVMCSALAAHYETKPNAAW | | |
| | VPPPVTHDFTYPSDEEIVPNPRANFSKTFLPQLD | | |
| | QVASRPGANTRMKAIAIKNVEATPSQARKDLED | | |
| | HVEVEDLDELESTSSSSLEVNLNLPRYNELNPSL | | |
| | PSDGEGYPNNFDSAPAHVTAEGDPRQHARQHA | | |
| | PRGENPSIGNWATMKEVFKKHFVAMKKDFSIV | | |
| | ELSQVRQWRDEAIDDYVIRFRNSFVCLAREMHL | | |
| | EDAIEMCVHGMQQHWSLEVSRREPKTFSALSS | | |
| | AVAATKLEFEKSPQIMELYKNASAFDPTKRFNA | | |
| | TKPSGSGNKPKVPTEANSTKVFSTAPQGQVPMI | | |
| | GAKNEQVGGRQRSTLQDLLKKQYIFRRELVKD | | |
| | MFNQLMEHRALNLPEPRRPDQVTMTDNPLYCP | | |
| | YHRYIGHAIEDCIAFKEWLQRAVNEKRINLDAD | | |
| | AINPDYHAVNMVSVEPFPQKQREGRRATSWAP | | |
| | LAQVEDQIAKIMLTKAPATHVEASHGDNNRAW | | |
| | SIVRWKPQPMSFPPRRPQMKLSPHTHPTSRRWL | | |
| | DPSRRRPPPRFVPFSEGDESFPRRGRELPTLAQFL | | |
| | PKGWEQSSTSTREAKGVNNSIPTPDIAPCNVILT | | |
| | YNDSTSTGSDETFTGREREIFHAELDPEKTKVEE | | |
| | VNISLRGGKTLPDPHKSKVPNVDKPAKKASPPG | | |
| | EAPEAPETKTGSKEKPAVDYKVLAHLKRIPALL | | |
| | SVYDALMMVPDLREALIKALQAPEVYEVDMA | | |
| | KHRLYDNPLFVNEITFADEDNIIKGGDHNRPLYI | | |
| | EGNIGSAHLRRILIDLGSAVNILPVRSLTRAGFTT | | |
| | KDLEPIDVVICGFDNQGKPTLGAITIKIQMSTFSF | | |
| | KVRFFVIEANTSYSALLGRPWIHKYRVVPSTLH | | |
| | QCLKFLDGNGVQQRITSNFSPYTIQESYHADAK | | |
| | YYFPVEENKQQLGRTTPAADIIVEPGTETTPEHV | | |
| | YPIYYTNIAQSKTLYLNTDHLGGNFSRKRETAQ | | |
| | KQRRCANYHHLTGKTESKQGSRACTTGSGQEE | | |
| | SCRDRGGKSGCSVHAAPSPLHFSFYPAREEACT | | |
| | TMKAEPRMARLLEKAGINLQRNNRLPPPPAVCE | | |
| | DWWAQAEEFIKRRCKEQPKYGLGYINVDEPDD | | |
| | EDEVFEDDIFHCCTISTTTRGDALLQQHPFEVAA | | |
| | VGVEEELDVAGALKQLDDGGQPTIDELVEMNL | | |
| | GTEDDPRPIFVSGMLTEEEREDYRSFLMEFRDCF | | |
| | AWTYKEMPGLDSRVATHKLAIDPQFRPVKQPP | | |
| | RRLRPEFQDQVIAEVDRLINVGFIKEIQYPRWLA | | |
| | NIVPVEKKNGQVRVCVDFRDLNRACPKDDFPLP | | |
| | ITEMVVDSTTGYGALSGYNQIKMDLLDAFDTAF | | |
| | RTPKGNFYYTVMPFGLKNAGATYQRAMQFVL | | |
| | DDLIHHSVECYVDDMVVKTKDHEHHQEDLRIV | | |
| | FERLRRHQLKMNPLKCAFAVQSGVFLGFVIRHR | | |
| | GIEIEPKKIKAILNMPPPQELKDLRKLQGKLAYIR | | |
| | RFISNLSGRIQPFSKLMKKGTPFVWDEECQNGF | | |
| | DSIKRYLLNPPVLAAPVKGRPLILYIATQPASIGA | | |
| | LLAQHNDEGKEVACYYLSRTMVGAEQNYSPIE | | |
| | KLCLALIFALKKLRHYMLAHQIQLIARADPIRYV | | |
| | LSQPVLTGRLGKWALLMMEYDITFVPQKAIKG | | |
| | QALAEFLATHPMPDDSPLIANLPDEEIFTAELQE | | |
| | QWELYFDGASRKDINPDGTPRRRAGAGLVFKT | | |
| | PQGGVIYHSFSLLKEECSNNEAEYEALIFGLLLA | | |
| | LSMEVRSLRAHGDSRLIIRQINNIYEVRKPELVP | | |
| | YYTVARRLMDKFEHIEVIHVPRSKNAPADALAK | | |
| | LAAALVFQGDNPAQIVVEERWLLPAVLELIPEE | | |
| | VNIIITNSAEEEDWRQPFLDYFKHGSLPEDPVER | | |
| | RQLQRRLPSYIYKAGVLYKRSYGQEVLLRCVD | | |
| | RSEANRVLQEVHHGVCGGHQSGPKMYHSIRLV | | |
| | GYYWPGIMADCLKTAKTCHGCQIHDNFKHQPP | | |
| | APLHPTVPSWPFDAWGIDVIGLINPPSSRGHRFIL | | |
| | TATDYFSKWAEAVPLREVKSSDVINFLERHIIYR | | |
| | FGVPHRITSDNAKAFKSQKIYRFMEKYKIKWNY | | |
| | STGYYPQANGMAEAFNKTLGKILKKTVDKHRR | | |
| | DWHDRLYEALWAYRVTVRTPTQATPYSLVYG | | |
| | NEAVLPLEIQLPSLRVAIHDELTKDEQIRLRFQEL | | |
| | DAVEEERLGALQNLELYRQNMVRAYDKLVKQ | | |
| | RVFRKGELVLVLRRPIVVTHKMKGKFEPKWEG | | |
| | PYVIEQAYDGGAYQLIDHQGSQPMPPINGRFLK | | |
| | KYFV | | |
| 8095 | SKEVGATPGLVPTHSPEVQGPKSYANVVSSRPS | AAD08951 | Arabidopsis |
| | LTKFNVDVSVVDGKSMVVVPDVVLEDSVPLW | | thaliana |
| | DDFLVGRFPSSAPHIAKIHVIVNKIWNLGDKSIRI | | |
| | DVFAVNDNTVKFRIRNASARLRALRRGMWNIC | | |
| | DLPMIVSKWTPIVEDAQPEIKSMPMWVVIKNVP | | |
| | YSMFTWPGLVAVGNDLVESVPLVDSQALEVVK | | |
| | GDIAEEVEEGEIASNSNQKSVQGEKIQEEGDWL | | |
| | TVSSSGGKKYISKVRKDFNLWSILEEVQNEDSV | | |
| | GKETEDSVKGVLEVVVVEGKEEMALNKTQQV | | |
| | KSCFDGASTRVSIPRSSKKAHKFVSVPNQKATD | | |
| | VLPRQFGCVLETRVIESKVPVIFAKVFKDWQMV | | |
| | SNYEFNRLGRIWVVWSSSVQLQVIFKSSQMIVC | | |
| | LVRVEHYDVEFICSFIYASNFVEERKKLWQDLH | | |
| | NLQNSVAFRNKPWLLFGDFNETLKMEEHSSYA | | |
| | VSPMVTPGMRDFQIVVRYCSLEDMRTHGPLFT | | |
| | WGNKRNEGLICKKLDRVLLNPEYNSAYPHSYCI | | |
| | MDSGGCSDHLRGRFHLRSAIQKPKGPFKFTNVI | | |
| | AAHPEFMPKVEDFWKNTTELFPSTSTLFRFSKK | | |
| | LKELKPILKDLSRNNLSDLTRRATYAYEELCRC | | |
| | QTKSLTTLNPHDIVDESLAFERWEKERHLLNAI | | |
| | HEVMDPQGTRPPNQDDIKIEAVRFFSDLLSSQPS | | |
| | DFTGISVDELKGILQYRYSLHEQNLLVAEITEAE | | |
| | VMKVFFSIPLNKSPGPDGYTVEFFRETWSVIGQE | | |
| | VTMAIKSFFTYGFLPKGLNSTILALIPKRTYAKE | | |
| | MKDYRPISCCNVLYKAISKLLANRLKCLLPEFIA | | |
| | PNQSAFISDRLLMENLLLASELVKDYHKDGLSP | | |
| | RCAMKIDLSKAFDSVQWPFLLNTLAALDIPEKFI | | |
| | HWINLCISTASFSVQVNGLRQGCSLSPYLFVICM | | |
| | NVLSAMLDKGAVEKRFGYHPRCRNMGLTHLCF | | |
| | ADDIMVFSAGSAHSLEGVLAIFKDFAAFSGLNIS | | |
| | LEKSTLFMASISSETCASILARFPFDSGSLPVRYL | | |
| | GLPLMTKRMTLADCLPLLEKIRSRISSWKNRFLS | | |
| | YAGRLQLLNSVISSLTKFWISAFRLPRACIREIEQ | | |
| | ISAAFLWSGTDLNPHKAKVAWHDVCKPKSEGG | | |
| | LGLRSLVDANKICCFKLIWRLVSAKHSLWVNWI | | |
| | QNNLIRTVAEALSSHRRRSHRDDILNDIEEELEK | | |
| | LLCRGICTEQDRSLCRSIGGQFKAKFFSPEIWHQI | | |
| | REQGLVKQWHKAIWFSGATPKFTFISWLAAHD | | |
| | RLTTGDKMASWNRGISSVCVLCNISAESRDHLF | | |
| | FSCNFSSHIWDRLTRRLLLCRYTTNFPALLLLLS | | |
| | GQDFSGTKRFLLRYVFQATIHTLWRERNKRRH | | |
| | GDLPIPSDHIIKFIDRQTRNRLSTITKQGLHKYAD | | |
| | GLRIWFAARDNLTPNH | | |
| 8096 | NKTLRVIQLNVRKQGAVHESLMNDEETQNTVA | BAE66176 | Aspergillus |
| | LAIQEPQARRIQGRLLTTPMGHHKWTKMVPST | | oryzae RIB40 |
| | WREGRWAVRSMLWINKEVEAEQVPIESPDLTA | | |
| | AVIRLPERLIFMASVYVEGGNASALDDACNHLL | | |
| | DAITKVRRDTGVVVEILIMGDFNRHDQLWGGD | | |
| | DVSLGRQGEADPIIDLMNECALSSLLRRGTKTW | | |
| | HGGGHSGDCESTIDLVLASENLADSVIKCAILGT | | |
| | EHGSDHCAIETVFDAPWSLPKHQGRLLLKNAP | | |
| | WKEINTRIANTLAATPSEGTVQQKTDRLMSAVS | | |
| | EAVHALTPKSKPSSHAKRWWTADLTQLRQIHT | | |
| | YWRNHARSERRAGRKVPYLETMAQGAAKQYH | | |
| | DAIRQQKKKHWNQFLADNDNIWKAERYLKSG | | |
| | EDAAFGKIPQLLRADGTTTTDHKEQAEELLAKF | | |
| | FPPLPDNIDDEGTRPQRAPVEMPAITMEEIERQL | | |
| | MAAKSWKAPGEDGMPAIVWKMTWPTVKYRV | | |
| | LDLFQASLEGGTLPRQWRHAKIIPLKKPNKENY | | |
| | TIAKSWRPISLLATLGKVLESVVAERISHAVETH | | |
| | GLLPTSHFGARKQRSAEQALVLLQEQIYAAWR | | |
| | GRRVLSLISFDVKGAYNGVCKERLLQRMKARGI | | |
| | PEDLLRWVEAFCSERTATIQINGQLSEVHSLPQA | | |
| | GLPQGSPLSPILFLFFNADLVQRQIDSQGGAIAFV | | |
| | DDFTAWVTGPTAQSNREGIEGIIKEALHWERRS | | |
| | GATFEAEKTAIIHFTPKTSKLDREPFTIKGQAVEP | | |
| | KDHVKILGVLMDTSLKYKEHIARAASKGLEAV | | |
| | MELRRLRGLSPSTARQLFTSTVTPVVDYASNVW | | |
| | MHAFKNKATGPINRVQRVGAQAIVGTFLTVAT | | |
| | SVAEAEAHIATAQHRFWRRAVKMWTDLHTLP | | |
| | DTNPLRRNTARIKKFRRFHRSPLYQVADALKNI | | |
| | EMETLETINPFTLAPWEARMQTDGEAMPDPQAI | | |
| | PGGSIQIAISSSARNGFVGFGVAIEKQPPQYRKL | | |
| | KLKTFSVTLGARSEQNPFSAELAAIAHTLNRLV | | |
| | GLKGFRFRLLTSNKATALTIQNPRQQSGQEFVC | | |
| | QMYKLINRLRRKGNHIKILWVPASEDNKLLGLA | | |
| | KEQARAATHEDAIPQAQVSRMKSTTLNLARSQ | | |
| | AATTKALPEDVGRHIKRVDAALPGKHTRQLYD | | |
| | GLSWKEATVLAQLRTGMARLNGYLYRINVAQT | | |
| | DQCACGQARETVEHFLFRCRKWTTQRIALLQC | | |
| | TRTHRGNLSLCLGGKSPSNDQQWVPNLEAVRA | | |
| | SIRFAMTTGRLDAV | | |
| 8097 | THANGQTTNKIYVTCICGKLCKNHWGLKIHLA | XP_684355 | Danio rerio |
| | RMKCLEQESKVQRTGPEPGETQEEPGPEATHRA | | |
| | KSLHVPEPQTPSEVVQQRIKWPPASKRSEWLQF | | |
| | DEDVSNIIQAIAKGDADSRLKTMTTIIFSYALERF | | |
| | GCIEKGKTKPTTPYTMNRRATQIHHLRQELRSL | | |
| | KKLYKKATDEEKQPLAELKNILRKKLMILRRAE | | |
| | WHRRRGRERARKRAAFITNPFGFTKQLLGDKRS | | |
| | GRLECLIEEVNRFIEETVSDPLREQELEPNKALIS | | |
| | PTPPAREFSLRGPSLKEVKEIIKASRSASTPGPSGI | | |
| | PYLVYKRCPGLLLHLWKILKVIWQRGRVAEQW | | |
| | RCAEGVWIPKEENSKNINQFRIISLLSVEGKVFFS | | |
| | IVSRRLTEFLLENNYIDPSVQKGGIPGAPGCLEH | | |
| | TGVVTQLIREAHENRGDLVVLWLDLANAYGSIP | | |
| | HKLVELALHRHHVPSKIKDLILDYYNNFKMRVT | | |
| | SGSETSSWHRIGKGIITGCTISVILFALAMNMVV | | |
| | KSAEVECRGPLTKSGVRQPPIRAYMDDLTITTTT | | |
| | VPGSRWILQGLERLIAWARMSFKPSKSRSMVLK | | |
| | KGKVVDKFHFSISGSVNPTITEQPVKSLGKLFDS | | |
| | SLKDSAAIQKSKKELGAWLAMVDKSGLPGRFK | | |
| | AWIYQHSILPRVLWPLLIYAVPMSTVESLERKIS | | |
| | GFLRKWLGLPRSLTSAALYGTSNTLQLPFSGLT | | |
| | EEFIVVRTREALQYRDSRDGKVSSACIEVRTGR | | |
| | KWNAGKAVEVAESRLQQKALVGTVATGRAGL | | |
| | GYFPKTLVSQVKGKERHHLLQGEVRASVEEER | | |
| | VSRVVGLRQQGAWTRWNTLQCRITWANILHA | | |
| | DFQRVRFLVQAVYDVLPSPSNLHIWGKNETPSC | | |
| | LLCSGRGSLEHLLSSCPKALADGRYRWRHDQV | | |
| | LKAIAASLASAINTSKNHRAPRKAVHFIKAGEKP | | |
| | RALPQLTTGLLHKASDWQLEVDLGKQLRFPHHI | | |
| | AATRLRPDIIAISEASRQLIILELTVPWEERIEEAN | | |
| | ERKRAKYQELVEACRERGWRTYYEPIEIGCRGF | | |
| | AGRSLCKVLSRLGITGVAKKRAIRSASEAAEKA | | |
| | TRWLWIKRADPWTAVGTQVGT | | |
| 8098 | ERSVEEKRKNWRMVDWKEYREKLEANLRKEM | EAU86808 | Coprinopsis |
| | GVGEIEDEDELEVEVDALIRAIGMTTEQVVKILE | | cinerea |
| | RVDWSRGWWNDECRRKKKEFNEARREAWKY | | |
| | RAMPEHPALEEERRIGREYRTLIERTRTECWNE | | |
| | WVREVTELQTWTLNKFIGNTPGDGGLDRMPTL | | |
| | RWTDENGVEVIATDGRSKAKGLVRQLFPERPA | | |
| | ESGVPEGYEYPEPVEYEARMTEERIKGAIKSLK | | |
| | AYKAPGPDGIPNVVWKECVELLAPQLERIFKAV | | |
| | YEKGMYSERWKEWTTVVLKKPGKPRYDTPKA | | |
| | WRPIALMNTMGKILTALLTEDLKYVTEKYSLLP | | |
| | NTHFGGRPGRTTTDAIQLLTSWIKGHWRKGNV | | |
| | VSVLFLDIEGAFPNVVVSRLAHNMRRRRVPEFI | | |
| | VKLIEHQLRDRRTKLKFDDYESEWVPIDNGSGQ | | |
| | GDPKSMLEYLFYNADLIDLVAGLGEELEEGENG | | |
| | EDAPRGSARERGTEKRDENAAAFVDDAWLGG | | |
| | AGATFEEANETLKDMMNRRGGAMEWSKKHNS | | |
| | KFEISKLVYMGFTRRMRRTREGEGGKMTAEER | | |
| | PELEMEGAGNDGGGEGDKVEHGVQENGESEER | | |
| | SGTEGAEDVVQRGDDTKGNIRIGNMVHTSEGD | | |
| | RGEEEEGGISFGDSKTHESTQNLPASNNWSAKD | | |
| | NGHGRLGDPRGDTTINGNAQLDMSKGLDTVVN | | |
| | CCFLAYKSLIALASLVALSSLALPLWFQDTTSDD | | |
| | PESTPTTQGSAISGKETTEETPVADTQAGRSIPRN | | |
| | TDDETGNHRTGCESTKRATTIRN | | |
| 8099 | SSGSRCEDWKRVRNLQRLLLKSYSNVLLAVRR | PZO49854.1 | Phormidesmispri |
| | VTQINAGKNTPGIDKMLVKTGPAKGKLVDLLK | | estleyi |
| | PQNAWQPLAARRVQIPKRNGKRRPLGIPSIIDRC | | |
| | LQAVVKAALEPCWEAQFEPTSYGFRPSRSVHD | | |
| | AIARLYVTANVNNRKKWVLEADIAGCFDTIDH | | |
| | DFLLQQIGHFPARRVIAQWLKAGYVENGIFHPS | | |
| | EAGTPQGGILSPLLANIALHGMETALGITRYAQ | | |
| | GCVKRTVKRVLVRYADDCVVVCDSQVEAEQA | | |
| | QVDLQRFLKFRGLELSEEKTRIVHLSEGFDFLSF | | |
| | NVRHYRSQNTRTGWKLLIKPAKSGGSKRTADG | | |
| 8100 | SSGSSGTPESKQSQPGGRKPPLMCHPAITYDAM | WP_1572103 | Turneriella parva |
| | CSLAGLQRAQISLIEELKRRGEGSKHALSYEDLT | 36 | |
| | ELGALLRSHQYSHRPCRLMTIKVGSKKRDIDSP | | |
| | DWLDRIVQRTYVDTIYPLVQQMACDSSHAYLY | | |
| | KRSIHTALWRLIMNIEHFGYSHVERTDIESFFDSI | | |
| | PHAEMERVIDLHIRDIELNAFSHELLRVAEGFKN | | |
| | SKVGLPTGWLIPPLWANMLLTPVDARLESAGL | | |
| | KFFRYGDDYGILQRSKQEAEFAQGLLESALKPL | | |
| | GLHLKPGYSHKTYTRKLEDGLIVLGHEIRRINNR | | |
| | LTVAISKNSLAETRSGGSKRTADG | | |
| 8101 | SSGSDEVSVTDRSLEQAFNAVFHDRESENDFCT | PCJ98666.1 | Alteromonadaceae |
| | LPLAPEVSEIPLHLRKVYRPSDKLKTYLRFIDKV | | bacterium |
| | VLRHLKYNASVVHSYIKGSSALTAVQAHAKNQ | | |
| | AFFLSDIKSFFPNIGDQDVRKVLMRDSHRIPILDF | | |
| | DQHIERVTKLMTLDGVLPVGFPTSPKLSNGFLH | | |
| | EFDNALAAYCDSTGLTYTRYSDDIIISGMDRAK | | |
| | LTVLREKVQMMLEEHASKSLRLNDEKTRVTHR | | |
| | GNKVKILGLVITPDGQVTIDVSRKHALEGLLHS | | |
| | GGSKRTADG | | |
| 8102 | SSGSLRNFGLPVISSLEDFASSTRLSVSFIKYYLF | WP_2022638 | Enterococcus |
| | QTDSHYKVFSIPKKKGGERIIAQPSRNLKAIQSW | 42 | faecium |
| | ILRNILDRLSSSENSKGFEKGDSILNNALPHSGAS | | |
| | YILSIDIEDFFPSISANKVHSVFRSLGYNSDVCKIL | | |
| | TTFCTYKGRLPQGAPTSPKLANLVSQQLDARIQ | | |
| | GYAGPKGIIYTRYADDLTLSSNTVKKLEKARDII | | |
| | GLISKSEGLKINSLKTKLTGSRSRKSVTGLIVTKE | | |
| | GVGIGRAKYRELRSHIYSGGSKRTADG | | |
| 8103 | SSGSEIPLIYSNRKLYEYIKNNKDDFLQCDIHKES | WP_0575852 | Paeniclostridium |
| | DSILTIPFTYLVRKNENEYRRLSLLHPIAQLQVA | 75 | sordellii |
| | NTLMKYDNLLLNYFNSNSTFSIRTPVGINDSYLN | | |
| | IENRHKLELEWIEKERAKDFSDEENEFVSNYFVI | | |
| | KKFKTITEFYKSDYVKNLELKYKNLIRIDYANCF | | |
| | ENIYTHSLEWAYVGNKNIIKNNLHDERFSAKLD | | |
| | ILAQRINYNETNGLVVGPEISRTLAEVVLARIDK | | |
| | NVYFDLKEKNIIYKRDYEVVRFIDDIMIFYNAEN | | |
| | IGDYIKESIENYSREFKLKINSSKTKYEKRPFFRE | | |
| | HMWISHSKKSIRSFLKYYDGSINYSGYTYDRFIE | | |
| | EFKELICSGGSKRTADG | | |
| 8104 | SSGSKLNKSILESYLQWYPFSKLTENSKCTILSE | WP_0947571 | Staphylococcus |
| | KFFFNFIKNGAIFKEYNTFNFPSHYSQKTSASFR | 11 | aureus |
| | NMTLVSPFVYLYIEVVGYHISKKYTRKSKYVRC | | |
| | YYSGDLSENEFSYKNSYDKFFADINALSSTYDN | | |
| | FYKFDISNFFDAVDINLLFKLINEGEEILDTRSSLI | | |
| | YKRLLQQIGGNKFPTLENSSTLSYLATYIYLDKV | | |
| | DYELEKVLQKNSKIESFQIIRYVDDLYIFFNTME | | |
| | SELNLVSSEIKNVVIDAYRKVKLNLNENKTKLG | | |
| | KSSEVNETLSVALYNHYVYKEEIDIAHFYDKNK | | |
| | ILLFLDDLYSGGSKRTADG | | |
| 8105 | SSGSSRAAGIDGITVDLFTGIAREQIHQLYRQMR | WP_0884289 | Halomicronema |
| | QERYVARPAKGFYLAKQKGGHRLIGIPTVRDRI | 78 | hongdechloris |
| | VQRYLLQSIYPSLENAFSDAVFAYRPGLSIYAAV | | |
| | KRVMERYRYQPTWVIKADIQQFFDQLSWPLLL | | |
| | HQLDQLSLPATWVQWIEQQLKAGIVVSGQFYQ | | |
| | PGQGVLPGSILSGALANLYLNDFDRHCLEADIPL | | |
| | VRYGDDCVAVCQSYLEASRSLALMQDWIEGLS | | |
| | LSFHPEKTTIIPPGQAFVFLGHRFRNGTVEGPAR | | |
| | QKAEGRRSGGSKRTADG | | |
| 8106 | SSGSVWESYKKVRANKGSSGVDGVSLQQFEEK | MBI4970604. | Candidatus |
| | LSDNLYKVWNRLSSGSYFPPAVKEVEIPKKDGG | 1 | Omnitrophica |
| | KRLLGIPTVGDRVAQMVVKDYLEPRLEKEFLN | | |
| | QSYGYLKSDKKISELSGKRRLEIEGEARISRAMC | | |
| | HFRLLECYGQFFDLNSEYGVVIKMSASREIEAIK | | |
| | RSTVKQTYDSILVDLNFGIANAPVVSPHDKFSQT | | |
| | LAKAHKAKVLLYMGEYADAASVALDAMGDA | | |
| | NYKLEDTYQEIFAKGYKAREVLFSPYMVYEEKS | | |
| | NTWTYAGFYCPVAQIETMADNEKADEVDSGGS | | |
| | KRTADG | | |
| 8107 | SSGSATYDNFLLAWQRTVNTTSRMIRDELGMKI | WP_0966735 | Fischerella sp.NI |
| | FAHNLQTNLEYLVQQVKAKDFPYKPLADHKVY | 02 | ES-4106 |
| | VPKPSTTLRTMSLMAVSDVIIYQALVNIIADKAY | | |
| | SYLVTHENQCVLGNIYSGPGKRWMLRPWKKQ | | |
| | YTRFVDCIENLYHAGNPWIASTDIVAFYDTIDH | | |
| | ARLLSLIRKYCGDDQQFQELLQECLAKWAVHN | | |
| | SNITMGRGIPQGSNASDFLANLFLYEIDKEMIVN | | |
| | GYHYIRYVDDVRILASDKSTVQRGLILFDLELK | | |
| | RAGLVAQVTKTSVHEIEDIETEISRLRFIITAPTR | | |
| | NGNCLLVTLPSLPKSEQASGGSKRTADG | | |
| 8108 | SSGSSGLLPLLGKREVWDEFLSYKAEKQHLSRK | MBD891878 | Lachnospiraceae |
| | DARYWTKFVEEEQYRSVTDHILEPDFSLSVPVK | 0.1 | bacterium |
| | LSVNKSNTGKKRVVYSFPEQESMVLKLLGHLLS | | |
| | RYDACLSPACYSFRKNITAKDAVSHILAVPGLS | | |
| | RKYVLKMDIRNYFNSMPVSSLLHVLKEILSDDP | | |
| | FLYSFLERMLTANEAYEHGRLITEERGAMAGTP | | |
| | TSAFFADVYLLSLDNYFAERGIPYFRYSDDILIL | | |
| | ADSPKELLSYREIAAKLIEEKGLSLNPDKLSVTP | | |
| | PGGAFEFLGFSIRGTDCPEKGMPAGKVDLSEAS | | |
| | GGSKRTADG | | |
| 8109 | SSGSRCMQRITKLYNKLLRSNRIFEQDQAGINIS | WP_0272704 | Legionella |
| | DIYTDKKNITKILIRELLNGSYKPMQYDERKVYI | 68 | sainthelensi |
| | NSKMRLIANYSFIDRLLLSILYDLFRERTLNLISP | | |
| | SVYSYISGRSAKQAIQSFCSYLKQIQAPNKQINL | | |
| | YVLRADITNYGGSIPADTHAIFWNYFYDILEEIK | | |
| | DLEQRDCLRIVIEEALRPILHTEDNLPYQKIVGIP | | |
| | VGSPLATLIYNLYLSELDEALSDIPYGFYARYSD | | |
| | DFIYANTDVNQFKEGERRITAILEKLRLRCNPSK | | |
| | NQRFYLTHAGKPSIDSEHFIGSNRIELCGLIIFSD | | |
| | GTRTLKRSIIQKMLERISGGSKRTADG | | |
| 8110 | QYQLQDAYGYCSYPRPQAAKSLLEKSLSDASL | WP_0136598 | Marinomonas |
| | HQACQTMYPRQANFDSSDTDEEHHDAIDELLT | 58 | mediterranea |
| | KLYVSRERIFKREFTPSQLHSVEIEKPEGGTRLLS | | |
| | VPNWHDRTLQKAVTECLGNTLEHIWMKHSYG | | |
| | YRKGHSRLQARDQINQYIQQGYEWVLESDIESF | | |
| | FDSVNWLNLEQRLKLLLPNEPLVPLLMQWVSA | | |
| | AKQTEDEQTLARHNGLPQGAPISPILANLLLDDL | | |
| | DQDMIAKGHQIVRYADDFVLLFKSKAAAESAL | | |
| | DDIITALKEHHLAINLEKTRIVEASQGFRYLGYL | | |
| | FVDGYAIETKREYRKEHAQLDKQLNASSLENEP | | |
| | SLQQEPAVQNEQSTLIGEREKLGTLKL | | |
| 8111 | GWLYNQMAMPETIFQAWYKVASNDGRPGWD | WP_0124658 | Chlorobium |
| | NKSIEDYSLQLEENLKALSQALLTGTYKQGPLM | 87 | limicola |
| | KLVLLKPDGKDRVLLIPGVMDRVAQTAAAIVLS | | |
| | PIIEAELGNCTFAYRPGISREGAAREIDRLHREGY | | |
| | QWVLDADIRSFFDNVRHDLLFQRLVELIDDKEM | | |
| | ISLLHRWLTAEIVDGINPRIQNTMGLPQGCPISPA | | |
| | LANLYLDRFDETMEKEGFKLVRFADDYLVLCK | | |
| | TRPKAEAALKLSETALAELKLELHSDKTRITTFA | | |
| | EGFKYLGYLFIRALVIPTKMHPEEWYDKLGKFK | | |
| | LRKKSEHALPSDPDAMTGETAKFELETDQGEKI | | |
| | ELTKNELLQTEFGCKLLESLDKKQLSVDEFLEK | | |
| | VARQDEERQKEKRDALKKLYSPFLNTKL | | |
| 8112 | SSGSKWKTLKKKRRYITNYQKIDSIKNNADSLF | WP_0897359 | Chryseobacterium |
| | ETIRYYKEKHPNELFIINLNKFVKDIQDSILNTNF | 81 | jejuense |
| | CFTSPKIIPLSKKDQSKCRPIALYNLKDRIIISLTN | | |
| | KYLSEYFDEHFFPESHAFRPKRIYKGKKVVTSH | | |
| | HHAMDSILKYKSDYKGKKLYVSECDISKFYDSV | | |
| | NHTIVKECFKKLISQSNLVIDSNAKRIFYKYLES | | |
| | YSFVHNVKIYNHKKYSDYWQQYKIDNGYFGWI | | |
| | DDDLKDLKYYKSVNHNRVGVPQGGAISGLIAN | | |
| | MVLHFADLELLKKKDSKLHYVRFCDDMVIIHP | | |
| | NKKQCEDYYQVYNESLKKLKLVPHLPLNFNFN | | |
| | NKQILKEFWSEDTKSKSPYRWSGSFRNSTKWIG | | |
| | FVGYEVSFNNEIRVRKRSLKKEKLKQSGGSKRT | | |
| | ADG | | |
| 8113 | SSGSKILQVVDNVERIYREGAGDKATQMIFSDIG | WP_0700435 | Streptococcus |
| | TPKSKEEGFDVYNELKDLLVDRGIPKEQIAFVH | 19 | agalactiae |
| | DANTDEKKNSLSRKVNSGEVRILMASTEKGGT | | |
| | GLNVQSRMKAVHHLDVPWRPSDIVQRNGRLIR | | |
| | QGNMHQEVDIYHYITKGSFDNYLWQTQENKLK | | |
| | YITQIMTSKDPVRSAEDIDEQTMTASDFKALAT | | |
| | GNPYLKLKMELENELTVLENQKRAFNRSKDEY | | |
| | RHTVSYCEKHLPIMEKRLSQYDKDIAQSLATKS | | |
| | QDFVMRFDNQAMNNRAEAGDYLRKLITYNRS | | |
| | DTKEVKTLASFRGFDLKMTTRGPSEPLPETVSL | | |
| | MIVGDNQYTVASGGSKRTADG | | |
| 8114 | SSGSMSKLKRLRSASTKPQLARVLEVDAAFLTR | WP_0658187 | Vibrio cidicii |
| | CLYINKTQNQYHQFSIAKKSGGTRLINAPSKELK | 78 | |
| | SLQKKLSILLLDCIDEINAEKYPRSQLVKPKLRK | | |
| | NGDPDYAAEVLKIKISTAETKQPSLAHGFVKER | | |
| | SILTNAMMHVGKKNVLNIDLNDFFDCFNFGRV | | |
| | RGFFIKNENFKLDQHIATVIAQISCFDNKLPQGSP | | |
| | CSPVITNLITHSLDIRLASLAKKHKCTYTRYADD | | |
| | ITFSTRLSEFPAQIMWHDSTTYRAGKALRKEISR | | |
| | SGFSINNSKTRIQYKDSRQNVTGLVVNKKPNIK | | |
| | QEYWRLVRAKCNSGGSKRTADG | | |
| 8115 | AEFRTKLIELLKEFRDCFAWEYYEMPGLSRSIVE | ABA93011.1 | Oryza sativa |
| | HRLPIKPGVRPHQQPPRRRKADMLEPVKAEIKR | | Japonica |
| | LYDAGYNQIFMAEEDIHKTAFRCPGAIGLFEWV | | |
| | VMTFGLKSAGAMYQRAMNYIYHDSIGWLVEV | | |
| | YIDDVVVKSKEIGDHIANLRKFLRFLVHERGIEV | | |
| | TQRSVNAIKKIQPPENKTKLQEMIGKINFVRRFIS | | |
| | NLLGRLRHYLLSNECTVICKADVVKYMLSAPIL | | |
| | KGRVGKWIFSLTESDLRYESPKAIKGQAVADFI | | |
| | VEHHDDS | | |
| 8116 | SSGSIEMSIDHIVQKRGAPGYDKMQPEELPAYW | HBZ63715.1 | Lachnospiraceae |
| | AKHGERIKETIQNGSYVPRPISIHYIPKADKTKK | | bacterium |
| | RKLGIPCIIDRMILYAIQSVMTPYFEEEFSDRSYA | | |
| | FRKGKGCHDALFACLLELNRGAEYVVDLDIKSF | | |
| | FDKVNHTLLFELLDKKIEDPYLLLLLKKYIRTKA | | |
| | VCGKTFYINRIGLPQGTAISPILANMFLNSFDKH | | |
| | LEKMEIRFVRYADDIVIFCHNKEDAHYLLSDAE | | |
| | SYLRYKLKLRLNQEKTKIVRPWELEYLGYSFSA | | |
| | ASNGNMFFSLGEKTKQHMSGGSKRTADG | | |
| 8117 | KYLVEVQDEVKPRGVLNIIPKQDNFRAIVSIFPD | XP_008199629 | Tribolium |
| | SARKPFFKLLTSKIYKVLEEKYKTSGSLYTCWSE | | castaneum |
| | FTQKTQGQIYGIKVDIRDAYGNVKIPVLCKLIQS | | |
| | IPTHLLDSEKKNFIVDHISNQFVAFRRKIYKWNH | | |
| | GLLQGDPLSGCLCELYMAFMDRLYFSNLDKDA | | |
| | FIHRTVDDYFFCSPHPHKVYDFELLIKGVYQVN | | |
| | PTKTRTNLPTH | | |
| 8118 | EFRTKLIELLKEFRDCFAWQYYEMPGLSRSIVEH | XP_0241905 | Rosa chinensis |
| | RLPTEPGVRPHQQPPRRCKADMLEPVKAEIKCL | 73 | |
| | YDASFIRRCRYAEWVSSIVPVIKKNGKERVCIDF | | |
| | RDLNKATPKDEYPMPVADQLVDAASGYKILSF | | |
| | MDGNVGYNQIFMAEEDIHKTAFRCPSAIGLFEW | | |
| | VVMTFGLKSAGATYQRAMNYIYHDLISWLVEV | | |
| | YIDDVVVKSKEIEDHIADLRKVFERTRKYGLKM | | |
| | NPTKCAFGVSAGQFLGFLVHERGIEITQRSINVI | | |
| | KMIKPPEDKTELQEMIGKINFVRRFISNLSGRLEP | | |
| | FTPLLRLKADQQSTWGAEQQKALDNIKEYLSSP | | |
| | PVLIPPQKGIPFWLYLSAGDKSIGSVFIQKLEGKE | | |
| | RADVVKYMLSAPILKGRIGKWIFSLTEFDLWYE | | |
| | SQKAIKGQAIANFIVDHRDDS | | |
| 8119 | VAVSDIRVVQEFQDVFQSLQGLPPSQSDPFTIEL | XP_013739312 | Brassica napus |
| | EPGTAPLSKAPYRMAPAEMAELKKQLKDLLGK | | |
| | GFIRPSTSPWGAPVLFVKKKDGSFRLCIDYRELN | | |
| | RVTVKNRYPLPRIDELLDQLRGATCFSKIDLTSG | | |
| | YHQIPIAEADVRKTAFRTRYGHFEFVVMPFGLT | | |
| | NAPAVFMRLMNSVFQEFLDEFVIIFIDDILVYSK | | |
| | SPEEQEVHLRRVMEKLREQKLFAKLSKCSFWQ | | |
| | REMGFLGHIVSAEGVSVDPEKIEAIRDWPRPTN | | |
| | ATEIRSFLGWAGYYRRFVKGFASMAQPMTKLT | | |
| | GKDVPFVWSQECEEGFVSLKEMLTSTPVLALPE | | |
| | HGQPYMVYTDASRVGLGCVLMQHGKVIAYAS | | |
| | RQLMKHEGNYPTHDLEMAAVIFALKIWRSYLY | | |
| | GGKVQVFTDHKSLKYIFTQPELNLRQRRWMEL | | |
| | VADYDLEIAYHPGKANVVVDALSRK | | |
| 8120 | RKLENTLESETELKRTLDKLYSKTKEHMEKKTR | WP_234449435 | Staphylococcus |
| | IKHTSLLEIAMSKPNIVTAIHSLKSNKGSMTPGV | | aureus |
| | DGKTIQDYLRLSEEKLIELIRGRLTNFKAHLIKR | | |
| | VFIPKANGGQRPLGIPTIEDRIIQQMMKQVLEPV | | |
| | LEAQFFKYSFGFRPERTTYHALERVKVLVHNTG | | |
| | YHWIVEGDIRQFFDKVNHRILIKKLWSMGIKDR | | |
| | RILCLITEFLKAGIFKNIIRNDNGTPQGGILSPLLA | | |
| | NVYLHSFDKWVAKQFEEFTTRHEYSKHDHKLR | | |
| | GLKSSNLKPGYLIRYADDWVLVTNNKSHAYRW | | |
| | KTVIKNFLQKELKLELSEEKTRITNIRHKPIEFLG | | |
| | FKYKVVLKGVKGKKKKDKKTRYISQITPSDKKI | | |
| | KRKVKELRATLTSLGKRLSHDKLSNAQLILAYN | | |
| | SKVRGLINYYSYATESPIMDREGYKLRKKTFNL | | |
| | LSRRGGVLHPINKCINLADKYPKRTQKTLAIKTE | | |
| | VGYIGIMHLNLTKMNENLYKQKVQNETPYSPS | | |
| | GRKLIERRKGTKEFSVRLDEITSLSLLEKVRKKL | | |
| | VNSPRYNFEYFMNRGYAFNRDRGKCRITGVPL | | |
| | GKHNLHVHHINPNLPLEEVNKLPNLACVDKEIH | | |
| | KAIHNEVDMSSILNNKEINKLKRFRNKIHAI | | |
| 8121 | SSGSKLEYKKVRKLNKLLINSFYNWVVQIHQVA | NP_001018800 | Schizosaccharom |
| | PEGKDNSRGDGKTLRIWNKGRVLNTKELVEWR | | yces pombe |
| | TRAIEVWRRNQSYQPKKLKRIYIPKPDGTERPLS | | |
| | IPTWFDQIIQAIIGNVVECQVESIIEANDLKAYGF | | |
| | RKGFKTADAIQGLQGYALTGKKQKLVEFDRSK | | |
| | FYETIPDDKLLAVLENVDRYTRNNIEKMLKNES | | |
| | LDLKGIVTKPEMGTPQGGNISPILANLYASTQIM | | |
| | LPFKKESQSKLTMYADDGIIICDNKENPEMALA | | |
| | KLEAIAEKAGLKLKKDKTKIIDGDRFNFLGYEIT | | |
| | RGKGIRLQKDMIKKCQKDGSGGSKRTADG | | |
| 8122 | SSGSFGIDIENATFKIVVINDKNNLSGTKKRRVIH | XP_039686367 | Medicago |
| | MPSPEMRIIHKRLIRWIRGQKRLVPISASGSRPG | | truncatula |
| | DSVFKSVFIHKKTRKHSYVSNGYTHIDTIGWFPR | | |
| | HFFCLDIKDAFPSVSVSKMTEALLFAGLDPNDY | | |
| | SYNKVISILERYCFTKEDGLIVGANASPDLFNIY | | |
| | AEYFLDRNLRRYCHEHSLVYTRYLDDLIFSSNK | | |
| | TIGKRKRKSIYKFIDESGLKVNEKKTKIYDLRKG | | |
| | CAVINGIGVNEKGRMFIPRQYLDTLRGYMNSGG | | |
| | SKRTADG | | |
| 8123 | SSGSFSANHCTAEDVANLFNYLNSHGEGNVERE | HCJ67074 | Elusimicrobia |
| | MLLKVIAEPEERKVLQEVKCLIDRYYPKRKKNP | | bacterium |
| | LEGIPKIKQFVTRFRNKERHYRSFAIPKRNGGRR | | |
| | IIEAPTQELANIQRLILKKILYRNQIWNSNSSVHG | | |
| | FVPGRNILSNASLHKEATVIVRIDLKDAFRNTKE | | |
| | EMLVKHLKEYFTEKGAKILVRLCTYKGHLPQG | | |
| | APSSGMLLNFVLGELDGKLKKIAGFMGWRYSR | | |
| | YADDLTFSCVEFNKHTVGIGKLIERVKSMIKDY | | |
| | SYRVNEEKIRVFKKNRAMRVTGLVLNSGKPTIS | | |
| | RKFRRNVRAKVHSGGSKRTADG | | |
| 8124 | FEVELTQENYRLPIRNYPLPPGKMQAMNDEINQ | NP_001018800 | Schizosaccharom |
| | GLKSGIIRESKAINACPVMFVPKKEGTLRMVVD | | yces pombe |
| | YKPLNKYVKPNIYPLPLIEQLLAKIQGSTIFTKLD | | |
| | LKSAYHLIRVRKGDEHKLAFRCPRGVFEYLVMP | | |
| | YGISTAPAHFQYFINTILGEAKESHVVCYMDDIL | | |
| | IHSKSESEHVKHVKDVLQKLKNANLIINQAKCE | | |
| | FHQSQVKFIGYHISEKGFTPCQENIDKVLQWKQ | | |
| | PKNRKELRQFLGSVNYLRKFIPKTSQLTHPLNKL | | |
| | LKKDVRWKWTPTQTQAIENIKQCLVSPPVLRHF | | |
| | DFSKKILLETDASDVAVGAVLSQKHDDDKYYP | | |
| | VGYYSAKMSKAQLNYSVSDKEMLAIIKSLKHW | | |
| | RHYLESTIEPF | | |
| 8125 | ELVEHRLPIKPGFRPYKQPPRHFNPLLYDRVKEE | XP_039686367 | Medicago |
| | IDRLLKAGFIRPCRYAEWVSSIVSVEKKGSGKIR | | truncatula |
| | VCIDFRDLNKATPKDEYPMPIADMMINDASGH | | |
| | KNAGATYQRAMNLIFHDLLGIILEIYIDDIVVKS | | |
| | DGMEGHIADLRLAFERMRQYGLKMNPLKCAFG | | |
| | VSAGRFLGFMVHERGVEIYPKKIEKIRDFKAPIC | | |
| | KKEVQKLLGMVNYLRRFIFNLAGKIDAFVPILH | | |
| | LKKEADFTWGAKQQEAFEELKRYLSTPPVVRA | | |
| | PKAGKPIRLYIASEDKVIGAVLTQEEDGKVYIIT | | |
| | YLSRHLLDAETRPILSGRIGKWAYALIKYDLAY | | |
| | EPLKSMRGQIACDFIVDHHVDIAYEEDVCLVEVI | | |
| | PWKIYFDGSSCKEGQGIGVVLFSPNGMCYEASV | | |
| | RLEYYCTNNQAEYNALLFDLQVMEMVGAKYV | | |
| | EAFGDSELVVQQVAEVYKCLDGSLNRYLDSCL | | |
| | DIIANFDNFAIRHIARHDNSRANDLAQQASGYD | | |
| | VK | | |
| 8126 | SEFRTKLIELLKEYRDCFAWEYYEMPGLSRSVV | ABF96295.1 | Oryza sativa |
| | EHRLPIKPGIRPYQQPPRRCKADMLEVVKAEVK | | group |
| | HLYDAGFIHPCRYAEWVSNIVPVIKKNGKVRVY | | |
| | IDDEVVISKEIEDHIADLRKVFERTRKYGLKMNP | | |
| | TKCAFGKLEPFTPLLRLKADQKFTWGAEQQKA | | |
| | LDNIKKYLSSPPVLIPPQKGISFRLYLSAGDKSIG | | |
| | SVLIQELERKERAIFYLSRRLLDAETRYSPVEKL | | |
| | CLCLYFSCTKLRHYLLSNECTVICKADVVKYML | | |
| | SAPILKGRVGKWIFALTEFDLRYESPKTIKGQAI | | |
| | ADFIMDHRDDS | | |
| 8127 | DTDHRTDKVWVLGIQRKLYQWSKANPDDQWR | WP_0109679 | Sinorhizobium |
| | DMWGWLTDLRVLRHAWQRVASNKGGRTAGV | 89 | meliloti |
| | DGMTVGRIRNRSEHRFLVDLQADLRSGAYRPSP | | |
| | ARRKLIPKAGKPGQFRPLGIPTIRDRVVQGAAKI | | |
| | LLEPIFEAQFWHVSYGFRPGRNTHGALEYIRRA | | |
| | ALPQKRDEDTRRNRLPYPWVIEGDIKGCFDNIN | | |
| | HHHLLERMRKRIGDRRVVRLVGLFLKAGVLTE | | |
| | DQFLRTDAGTPQGGIISPLLANIALSAIEERYER | | |
| | WTYHRKKTQARRKSNGVAAAASARDSDRIAG | | |
| | RCVYLPVRYADDFVVLVSGSLEEAMAEKSALA | | |
| | DYLIKTTGLTLLPEKTKVTAMTEGFEFLGFRFSV | | |
| | HWDKRYGYGPRVEIPKAKAANLRHKVKQLTQ | | |
| | RDSISVSLGEKLRGVNAITSGWANYYRYCVGA | | |
| | GRVFVALDWYIGLRLYCWLHKKRPKATPSELW | | |
| | GSKQPSRRRATRRVWREGSVEQHVLGWTPVDR | | |
| | YRLAWMDMPDFAMSSGEPDA | | |
| 8128 | SPVLAELKEQGIVIPTHSPFNSPVWPVRKPNGK | NP_989963 | Gallus gallus |
| | WRLTIDYRRLNANTGPLTAAVPNISELIAAIQEQ | | |
| | AHPFMATIDVKDMFFMVPLHPDDQLRFAFTWE | | |
| | GQQYTFTRLPQGFKHSPTLAHYALAKELEQIPL | | |
| | EEGVRLYQYIDDILIGGDHLTPVKIMHDKIIKRL | | |
| | EELGLTIPPDKIQSPAAEVKFLGIWWKGGMACIP | | |
| | QDTLSALDQLKMPENKKELQHALGLLVFWRKH | | |
| | IPDFSIIARPLYDLLRKGVSWGWTPVHEEALQLL | | |
| | IFEAITHQSLGPIHPSDPVQIEWGFAHSGLSIHLW | | |
| | QKGPEGPIRPIGFYSRSFKDAEKRYSQLEKGLFV | | |
| | VSLALREAERTIRQQPIILRG | | |
| 8129 | SSGSNVRSIMPLSKGKSLLHRTFTTANLDSSLKT | KJR40057.1 | Candidatus |
| | LPNSSPGPDTITTDDLKKAGDQFLDKLKNNIVN | | Magneto |
| | GNYKQGKTKQYRIPKNDDTFRYIYVLNTTDRL | | ovumchiemensis |
| | VHKTIADYISPIVDNIISNSAYAYRRGLNTKGAA | | |
| | NALNNALKEGYTSGIKADISEFFDSINISALSMMI | | |
| | DSLFPFEPLADFINGILENNTRDGIKGILQGSPLSP | | |
| | LLSNLYLTRFDSDMESKGFFKLIRYADDFVLLL | | |
| | KTASSYEETIKHVEDSLSTLGLKLKPEKTTEITQ | | |
| | GKAINFLGYVITDETIAKPSGGSKRTADG | | |
| 8130 | QPLLQFPEGKVRNFQRKLYVKAKQEKTFRFYSL | WP_0666659 | Desulfotomaculum |
| | YDKLYREDVLQYAWQQCRANKGAPGADGQSF | 84 | copahuensis |
| | KDIEEKVGVERFLKEIAEELRNGTYRPMPVRRV | | |
| | YILKPDGSQRPLGIPTIKDRIAQMACLTVIQPIFE | | |
| | ADFLDCSYGFRPKRNAHQAIGAITENIKQGFTA | | |
| | VYDADLTKCFDSIQHRLIMDSLAERITDGKVLR | | |
| | LIKGWLEAPIVEPGGPKQGRKNYQGTPQGGVIS | | |
| | PLLANIVLNRLDRLWHRPGGPRERYNARLVRY | | |
| | ADDFVVLARFIGEPIKNELESIITSMGLNLNEKK | | |
| | TRILDLNKGDILNFLGYSIRISRDKNRRITIKPSD | | |
| | KAIARLRDKIREIISRERLYHGLKGIIAEINPVLRG | | |
| | WKQYFKLTNVSRIFSGLNFYITARFYRVGRKTS | | |
| | QRYSKIFKPGVYVTLRKMGLYCLATD | | |
| 8131 | WFADEPRHTRGGSRMADLYRQVRLMKTLSSA | WP_1541004 | Pseudomonas |
| | WRVVRASCMQSSSSEIRNEAIEFEADSFRQLKSI | 73 | aeruginosa |
| | QSKLQKKKFEFLPQHGIAKKRPGKSSRPLVIAPI | | |
| | PNRIVQRAILDVLQDNVAYVQEILKVETSFGGIK | | |
| | GKNVALAIAAINKAFSNGVTHYVRSDIPSFFTKV | | |
| | QRAKVVDALAKNIDDVDMVNLFSAAIETTLGN | | |
| | LTDLQRRGLESIFPLSHDGVAQGSPLSPLIANIYL | | |
| | AEFDREMNREGLACIRYIDDFVIMAASEKQVM | | |
| | KGFRAAKAVLRRQGLQVYSPDDDPLKASKGDV | | |
| | RDGFDFLGCYVKPGLVQPSKFARNRLLEKIDSG | | |
| | GSKRTADG | | |
| 8132 | RAAGIDGITVDLFTGIAREQIHQLYRQMRQERY | WP_0884289 | Halomicronema |
| | VARPAKGFYLAKQKGGHRLIGIPTVRDRIVQRY | 78 | hongdechloris |
| | LLQSIYPSLENAFSDAVFAYRPGLSIYAAVKRV | | |
| | MERYRYQPTWVIKADIQQFFDQLSWPLLLHQL | | |
| | DQLSLPATWVQWIEQQLKAGIVVSGQFYQPGQ | | |
| | GVLPGSILSGALANLYLNDFDRHCLEADIPLVR | | |
| | YGDDCVAVCQSYLEASRSLALMQDWIEGLSLS | | |
| | FHPEKTTIIPPGQAFVFLGHRFRNGTVEGPARQK | | |
| | AEGRR | | |
| 8133 | DTSNLMEQILSSDNLNRAYLQVVRNKGAEGVD | WP_1441257 | Dorea |
| | GMKYTELKEHLAKNGETIKGQLRTRKYKPQPA | 33 | formicigenerans |
| | RRVEIPKPDGGVRNLGVPTVTDRFIQQAIAQVLT | | |
| | PIYEEQFHDHSYGFRPNRCAQQAILTALNIMND | | |
| | GNDWIVDIDLEKFFDTVNHDKLMTLIGRTIKDG | | |
| | DVISIVRKYLVSGIMIDDEYEDSIVGTPQGGNLS | | |
| | PLLANIMLNELDKEMEKRGLNFVRYADDCIIMV | | |
| | GSEMSANRVMRNISRFIEEKLGLKVNMTKSKV | | |
| | DRPSGLKYLGFGFYFDPRAHQFKAKPHAKSVA | | |
| | KFKKRMKELTCRSWGVSNSYKVEKLNQLIRGW | | |
| | INYFKIGSMKTLCKELDSRIRYRLRMCIWKQWK | | |
| | TPQNQEKNLVKLGIDRNTARRVAYTGKRIAYV | | |
| | CNKGAVNVAISNKRLASFGLISMLDYYIEKCVT | | |
| | C | | |
| 8134 | SSGSQLRVEIRGRRSQPIISSWVSLLESTLFTVSPS | WP_1574472 | Catenovulum |
| | TTQLSPTHKSLSYPNYNFIDHIDADLSPHMTVRH | 74 | agarivorans |
| | ILAADLGISVQLISRILANKTQYYRSFEIIRKNGN | | |
| | KRLIEAPRTYLKVLMRYINHHLLTGLAIHDSVH | | |
| | SYRQGKSFLTNAQIHVAKQYVFNLDIENYFGCI | | |
| | NKRQVRELFSINDFTASAATLLSELCTFNDRLPQ | | |
| | GAPTSPIISNAILFKIDQSMHRYCEKNNLCYTRY | | |
| | SDDITLSGNSRQSIVKAKSRLIAMIHGAGFKIND | | |
| | KKTRLMPYHKQQLVTGVVVNKEATPARNELRR | | |
| | IRAKFHSGGSKRTADG | | |
| 8135 | ALLERILARDNLITALKRVEANQGAPGIDGVST | WP_0135228 | Geobacillus |
| | DQLRDYIRAHWSTIHAQLLAGTYRPAPVRRVEI | 81 | sp. Y412MC52 |
| | PKPGGGTRQLGIPTVVDRLIQQAILQELTPIFDPD | | |
| | FSSSSFGFRPGRNAHDAVRQAQGYIQEGYRYVV | | |
| | DMDLEKFFDRVNHDILMSRVARKVKDKRVLKL | | |
| | IRAYLQAGVMIEGVKVQTEEGTPQGGPLSPLLA | | |
| | NILLDDLDKELEKRGLKFCRYADDCNIYVKSLR | | |
| | AGQRVKQSIQRFLEKTLKLKVNEEKSAVDRPW | | |
| | KRAFLGFSFTPERKARIRLAPRSIQRLKQRIRQLT | | |
| | NPNWSISMPERIHRVNQYVMGWIGYFRLVETPS | | |
| | VLQTIEGWIRRRLRLCQWLQWKRVRTRIRELRA | | |
| | LGLKETAVMEIANTRKGAWRTTKTPQLHQALG | | |
| | KTYWTAQGLKSLTQRYFELRQG | | |
| 8136 | FTQEHLHFAWLQVCAGSKTAGVDGISVELFES | WP_0151136 | Nostoc |
| | MATEQLQNLVYQLNNETYTASPAKGFYIPKKN | 54 | sp.PCC7107 |
| | GDKRLVGIPTVRDRIIQRLLLDELYFPLEGTFLD | | |
| | CSYAYRPGHNILQAVQHLYGYYQYQPKWIIKA | | |
| | DVADFFDNLSWALLLTFLEKLSLEPSVLQLIEQQ | | |
| | LQSGMIIAGQYRNFGKGVLQGGILSGALANLYL | | |
| | TNFDKKCLSQGINLVRYGDDFVIACNSWQEAN | | |
| | RILDKITVWLGEVYLTLQSEKTQIFTPNDEFTFL | | |
| | GYRFAGGEVYAPPPPKPVLKGEWVINDSGNPYF | | |
| | RTKPRPKKPVSHPPKACSIDKPINFPRASLSHYW | | |
| | QETMTTKL | | |
| 8137 | TSSRKEQGQQKTLSRGSLQEEVVNTQGTVRAQS | WP_0834303 | Alicyclobacillus |
| | SYPAQVRSDTCGTEYTLLDEMLKLDNMMAAL | 65 | macrosporangiidus |
| | KRVEQNKGAAGVDEVDVKSLRPYLKEHWFRIR | | |
| | EELLEGTYKPQPVRRVEIPKSDGGVRLLGIPTLV | | |
| | DRLIQQGLAQVLTPIFDPNFSNSSYGFRPNRSTH | | |
| | QAVKQAKQYIEDGYRHVVDLDLEKFFDRVNHD | | |
| | ILMARVTRKVKDKRVLKLIRAYLNAGVMANG | | |
| | VCVRSEQGVPQGGPLSPILSNIILDDLDKELERR | | |
| | GHRFVRYADDCNIYVKTVRAGQRVMEGVKRF | | |
| | VEDELKLKVNEQKSAVDRPWKRKFLGFSFTPER | | |
| | KTRTRIAPKARAKFEDKVRELTSRSRSMSMAKR | | |
| | IDQLNVYLRGWMGYFRLADTRSVIESLDQWTR | | |
| | RRLRMCYLKQWKKPKSVYRNLVKLGLSADFA | | |
| | RRISGSGKGYWRLSNTPQMNKALGLAFWANQ | | |
| | GLLSLVHLYDKHRSVS | | |
| 8138 | LNQILARPNMIQALKRVEANKGRHGVDMMPV | WP_0108613 | Lysinibacillus |
| | QTLRQHILENWESIKAQILTGTYEPQPVRRVEIP | 99 | sphaericus |
| | KPDGGVRLLGIPTVTDRLIQQAISQILSKEYDQT | | |
| | FSDNSYGFRPNRSAHDAVRKAKGYMKEGYRW | | |
| | VVDMDLEKFFDKVNHDRLMATLAKRIHDKSLL | | |
| | KLIRKYLQAGVMINGVVSSTEEGTPQGGPLSPL | | |
| | LSNIVLDELDKELEKRGHKFVRYADDCNIYVKS | | |
| | KRAGDRTIASVQRFVEGKLRLKMNESKSAVDR | | |
| | PWNRKFLGFSFSHHKEPKVRVAKTSLQRMKKK | | |
| | IREITSRKKPVPMEHRIEKLNQYLIGWCGYFALA | | |
| | DTPSIFSRLDGWIKRRLRMCLWKNWKKPRTRV | | |
| | RNLIRLKVPYGKAYEWGNTRKGYWRISKSPILH | | |
| | RTLGNSYWGSQGLKSLQSRYESLRYSS | | |
| 8139 | WEQVWERENLLAALKRVERNGGAPGIDGMTV | WP_0157390 | Ammonifex |
| | EELRPYLREHWLEIRETLDQQSYQPSPVRRVEID | 74 | degensii |
| | KPEGGVRLLGIPTVLDRFLQQAMAQVLTPLFEP | | |
| | QFSPASYGFRPGRSAHEAVKQAQEYVQAGYEW | | |
| | VVDIDLERYFDQVNHDMLMARVARVVADKRV | | |
| | LKEIRAYLKSGVMVNGVVQDTGEGTPQGGPLS | | |
| | PLLSNIMLDDLDKELEKRGHKFVRYADDCNVY | | |
| | VRTQRAGERVMESVKAYLEKKLKLKVNPKKSK | | |
| | VERATRVKFLGFSFYERNGEVRVRVASQSVARF | | |
| | RKKLRGLTKRTRSGKLEEVIETINGYLMGWMA | | |
| | YYRLADTPSVFAGLDSWIRRRLRQMIWKRWKR | | |
| | GKTRYRELVKLGVPRGRAALGAVGKSPWHMS | | |
| | KTPVVNEALSNAYLRNSGLKSLKARYQELRVA | | |
| 8140 | ERILSRENLIQALERVEKNKGSYGVDEMDVKSL | WP_0108964 | Alkalihalobacillus |
| | RLHLHENWTSIRNEIIEGSYFPKPVRRVEIPKPNG | 06 | halodurans |
| | GVRKLGIPTVMDRFLQQAIAQILTQLYDPTFSER | | |
| | SFGFRPHRRGHNAVRQAKQWMKEGYRWVVDI | | |
| | DLEKFFDKVNHDRLMRKLSSRIQDPRVLQLIRR | | |
| | YLQTGVMERGLVSPNTEGTPQGGPLSPLLSNIV | | |
| | LDELDNELEKRGLKFVRYADDCNIYVRSKRAG | | |
| | LRIMESVTSFIENRLKLKVNREKSAVDRPWNRK | | |
| | FLGFSFTRGKDPKMRVSKESVKRLKQRIRELTS | | |
| | RRHSMKMSDRLRRLNRYLTGWLGYYQVVDTP | | |
| | SILAQIDAWIRRRLRMIRWKEWKTTSARQKNLV | | |
| | RLGIKKAKAWQWANSRKGYWRVAHSPIMDYA | | |
| | LNSEYWKGQGLMSLAERYQTRRWT | | |
| 8141 | LERILSRENLIQALTRVEGNKGSHGVDEMPVQN | WP_0880530 | Virgibacillus |
| | LRAHILEHWTTIRGQLEKGTYYPQPVRRVEIPKP | 30 | dakarensis |
| | NGGKRKLGIPTVMDRFLQQAIAQVLTDIYDPTF | | |
| | SQHSYGFRPKRRGHDAVREARNYIKQGYRWVV | | |
| | DMDLEKFFDKVNHDRLMRTLSQRINDSRVLKLI | | |
| | RRYLQAGVMEDGIVRPNTEGAPQGGPLSPLLSN | | |
| | IVLDELDKELEKRGLHFVRYADDCNIYVRSKRA | | |
| | GLRVMKSITKFIEGKLKLKVNEQKSAVDRPWK | | |
| | RKFLGFSFTVHKEKPKIRVSKESVQRFKQRIREL | | |
| | TSRRKSMNMKDRIEKLNRYLVGWLGYYQLAD | | |
| | TPSIFKGLDSWIRRRLRMIRWKEWKKVKTKYK | | |
| | NLMKQGINKGKAWEWANTRKAYWRIANSPIL | | |
| | HKALGDRYWSNQGLKSLYYRYQTLRWT | | |
| 8142 | AQIEEFVHVERISMLMEMILSRENLLAALKRVE | WP_0662517 | Aeribacillus |
| | QNKGSHGVDGMSVKDLRRHLYENWDSIRQSLR | 48 | pallidus |
| | EGTYKPLPVRRVEIPKPNGGVRLLGIPTVTDRFI | | |
| | QQAIAQVLTKIFDPTFSNHSYGFRPGRRGHDAV | | |
| | REAKGYIKEGYRWVVDIDLEKFFDKVNHDKLM | | |
| | GILAKTIKDQILLKVIRRYLQSGVMINGVVMET | | |
| | DMGTPQGGPLSPLLSNIMLHELDKELEKRGHKF | | |
| | VRYADDCNIYVKTKKAGIRVMNSITNFIEKELK | | |
| | LKVNKEKSAVDRPWKRKFLGFSFTLNKTPKVRI | | |
| | ANESVKRLKNKIREITSRSKPYPMEKRIEKLNKY | | |
| | LMGWCGYFALAETPSKFKELDEWIRRRLRMCL | | |
| | WKEWKTPKTRIRKLRGLGVPSHKAFEWGNTRK | | |
| | KYWRIACSPILHKTLDNSYWKRRGLRSLFERYQ | | |
| | ALRHT | | |
| 8143 | LMDLILSRENLIAALKRVERNKGSHGIDGMSVK | WP_1972453 | Cytobacillus |
| | SLRRHLYENWDSLCDSLRKGTYQPNPVRRIEIP | 11 | firmus |
| | KPNGGVRLLGIPTVTDRFIQQAIAQILTPLFDPSF | | |
| | SEHSYGFRPNRRGHDAVRKAREYISEGYRWVID | | |
| | MDLEKFFDKVNHDKLMGILASRIQDRLVLKLIR | | |
| | KYLQAGIMINGVVYDAEEGTPQGGPLSPLLSNIL | | |
| | LDKLDKELERRGHKFVRYADDCNIYMKSKKAG | | |
| | ERVMNSITRFIEQKLKLKVNRGKSAVDRPWKR | | |
| | KFLGFSFTLNKKPKVRIANESIKRLKTKIREFTSR | | |
| | SKSIPMEVRIEKLNQYLTGWCGYFALADTPSKF | | |
| | KEFDEWIRRRLRMIEWKQWKNPRTRVRKLKGL | | |
| | GVPDQKAYEWGNSRRKYWRIASSPILHKTLDN | | |
| | SYWSNRGLKSLYQRYEFLRQT | | |
| 8144 | RSHEGQRQQKISRESLRQREAVKPSGYAGAPSS | WP_1382262 | Paenibacillus |
| | SSAQIDPSSREANNDLLERMLRGDNLRLAYKRV | 90 | algicola |
| | VQNGGAPGVDNVTVANLQAYLKTHWEAVKTE | | |
| | LLAGTYRPMPVKRVEIPKPGGGVRLLGIPTVMD | | |
| | RFLQQALLQVMTPIFDADFSRHSYGFRPGKRAH | | |
| | DAVKQAQRYMQEGFRWVVDMDLAKFFDRVN | | |
| | HDMLMARVARKVTDKCVLKLIRAYLNAGVMA | | |
| | NGVTEKTGEGTPQGGPLSPLLANILLDDLDKEL | | |
| | TERGLRFVRYADDCNIFVASKRAGERVMDSVT | | |
| | RFVEGKLKLKVNREKSAVDRPWNRKFLGFSFL | | |
| | RDKKATIRLAPQTISRFKEKVRELTNRTRSMSM | | |
| | ENRIAQLNRYLMGWIGYFRLASAKGHCEKFDQ | | |
| | WIRRRLRMCLWKQWKRVRTRIRELRALGVPE | | |
| | WACFVMANSRRGAWEMSRNTNNALPTSYWEA | | |
| | KGLKSLLSRYLELC | | |
| 8145 | SSNELHRKQKTHSRASLREIAVNTQRTAKGQSIS | WP_2210399 | Gelria sp. |
| | SAQTRISPCKDQGNNLMEKVVERSNMMAALRR | 73 | Kuro-4 |
| | VEQNKGAAGIDGVKTDELRNLLWDIWTDTKEQ | | |
| | LLTGTYRPKPVRRVEIPKPNGGVRLLGIPTVLDR | | |
| | LIQQALLQILTSIFDPTFSEASYGFRPGKRAHTAV | | |
| | RVARSYVESGYDWVIDMDIEKFFDRVNHDILM | | |
| | ARVARKVKDKRVLKLIRRYLQAGVMLGGVVV | | |
| | RTEEGTPQGGPLSPLLANIYLDDLDKELEKRGH | | |
| | KFVRYADDCNIYVKSQRAAERVMQSIREFLQK | | |
| | RLKLKVNEEKSCVDRPWNLKYLGFSMFKSKGK | | |
| | VRICLAPETIKRVKNKIREFTSRSKPIRMEDRIRR | | |
| | LNAYLGGWLGYFALADTSNDFASIDGWLRRRL | | |
| | RMCLWRQWDRVRTRLRELRALGLPEWVAHQL | | |
| | ANTRKGPWRMSHRPLHSALNNAYWEKQGLLS | | |
| | LAKRHQAICQA | | |
| 8146 | SPANRAVIDEQMDKWMKLDVIEPSKSPWAAPV | XP_0431833 | Rhizoctonia |
| | FIVYRNAKPRMVIDLRKLNESVVPDEHPIPRQEE | 11 | solani |
| | ILQSLQGCKYLSSLDALAGFTQLSIHEDDREKLA | | |
| | FRTHRGLFQFKRMPFGYRNGPAVFQRVMQNVL | | |
| | SPYLWLFTLVYIDDIVIYSKTFDEHLAHVDLVLK | | |
| | AIMESKLTLSPDKCHFGYGSILLLGQKVSRLGLS | | |
| | THKEKVQSILDLETPKNVKTLQTFLGMMVYFSS | | |
| | YIPFYSWIAHPLFQLLKKGTKWEWKAEHQNAF | | |
| | ELCKEVLTEAPVRAHAMPGRPYRVYSDACDFG | | |
| | LAAILQQVQPVEIRDLRGTRTYDRLRKAFDKGE | | |
| | KVPVLAQTISKDVKDVPEDVWASDFESTTVHIE | | |
| | RVIAYWSRVLQSAERNYSPTEREALALKEGLVK | | |
| | FQVYLEGEKVLAITDHAALQWSRTFQNVNRRL | | |
| | LSWGLVFSAF | | |
| 8147 | SSGSSYFYKERRGKIYESYYGSIVTYNTTTSKMA | WP_0147575 | Thermoanaero |
| | DSKELFSSFFKARMSLKKEFPYDEIAIKLFEYNL | 44 | bacterium |
| | EDNINRFSKEILKGYKFNTDFIGYKVPKNEKDD | | |
| | RQKVMDNIFNTIAGASFLDIIGIVIDREFSSNCCG | | |
| | NRLNKKLNTEYSYEYFWYGWYYKFMKKAFNK | | |
| | VLNKNNYYLKLDIKSFYTNINQNILYDKIIKLIPY | | |
| | KDSRLKEFINSLIKRHIPYVNNGKGLPQGSLTSG | | |
| | FLANLYLDDFDKYFISKTNDGYMRYVDDIFIFG | | |
| | KTEEQIKELGKEAENKLKDLYLEINKEKTSMGD | | |
| | KSSLKNIYYDDKELDDFQKRLSGGSKRTADG | | |
| 8148 | SSGSLRINSLKHLAHRLGFAPEVLQKAASRAEK | WP_0159038 | Desulforapulum |
| | SYKFDKIPKKSGKGFREISKPNALLKNIQKAIHK | 04 | autotrophicum |
| | LLTEIEISDNAHCGIKKRSNVTNAMNHCNKEWV | | |
| | YSMDFKNFFPNISHHQVYGLFRYELKCSPDVTSI | | |
| | LTRLCTVKGGVPQGGSMSMDIANLVSRKLDTR | | |
| | LEGLCKIHNLSYTRHCDDLNFSGKRILDTFRAK | | |
| | VEIIIKESGFPLNPDKETLIPHHHPQSVVGLRVNR | | |
| | KKPCVPRKTRREWRKEKHSGGSKRTADG | | |
| 8149 | IPNVVWKECVELLAPQLERIFKAVYEKGMYSER | 36HUJA2X0 | Citromicrobium |
| | WKEWTTVVLKKPGKPRYDTPKAWRPIALMNT | 1R | |
| | MGKILTALLTEDLKYVTEKYSLLPNTHFGGRPG | | |
| | RTTTDAIQLLTSWIKGHWRKGNVVSVLFLDIEG | | |
| | AFPNVVVSRLAHNMRRRRVPEFIVKLIEHQLRD | | |
| | RRTKLKFDDYESEWVPIDNGSGQGDPKSMLEY | | |
| | LFYNADLIDLVAGLGEELEEGENGEDAPRGSAR | | |
| | ERGTEKRDENAAAFVDDAWLGGAGATFEEAN | | |
| | ETLKDMMNRRGGAMEWSKKHNSKFEISKLVY | | |
| | MGFTRRMR | | |
| 8150 | KSAEYLNTFRLRNLGLPVMNNLHDMSKATRIS | WP_0990105 | Escherichia coli |
| | VETLRLLIYTADFRYRIYTVEKKGPEKRMRTIYQ | 51 | |
| | PSRELKALQGWVLRNILDKLSSSPFSIGFEKHQSI | | |
| | LNNATPHIGANFILNIDLEDFFPSLTANKVFGVF | | |
| | HSLGYNRLISSVLTKICCYKNLLPQGAPSSPKLA | | |
| | NLICSKLDYRIQGYAGSRGLIYTRYADDLTLSA | | |
| | QSMKKVVKARDFLFSIIPSEGLVINSKKTCISGPR | | |
| | SQRKVTGLVISQEKVGIGREKYKEIRAKIHHIFC | | |
| | GKSSEIEHVRGWLSFILSVDSKSHRRLIAYISKLE | | |
| | KKYGKNPLNKAKT | | |
| 8151 | ITPLVSFTSFAQFEQALRDSRVSAHSGASFSNSLE | WP_0142640 | Granulicella |
| | VDRLVKSARELYGRGLPPIVSSRTFSLLFGVSPR | 22 | mallensis |
| | LISAMTKSPEKYWRTFEIKKRSGKGRNIAAPRVF | | |
| | LKTVQRFLLRFVLEKIPIHPNAFGFAPGKGIFKH | | |
| | AERHLKARFVLTLDIADFFPSISWTQVRDIFANI | | |
| | GFPDGVPSLLADLCTRNKVFPQGAPTSPYLSNLI | | |
| | FLKTDEALTEAANQFEMRYSRYADDLTFSCDSQ | | |
| | PSDEARLAFEQIIRDAGFRIQHSKTRLRGPSQAR | | |
| | EVTGLLVNEKIQPSRHTRRLLRAKFH | | |
| 8152 | SLQLEEEYRLYQEREKPPEELQEWLLRFPQAWA | XP_0343693 | Arvicanthis |
| | ETGGTGMARQAPPVVIELKSGATPIGVRQYPMS | 84 | niloticus |
| | KEAREGIRPHIKRLLEQGILVPCRSPWNTPLLPV | | |
| | KKPGTNDYRPVQDLREVNKRVQDVHPTVPNPY | | |
| | NLLSTLPPTRTWYTVLDLKDAFFCLRLHPNSQP | | |
| | LFAFEWRDPESGRTGQLTWTRLPQGFKNSPTLF | | |
| | DEALHRDLAPFRANNPQVTLIIYIDDILLATETRE | | |
| | DCELGTQKILAELGELGYRVSAKKAQLCRTEVT | | |
| | YLGYTLKNGQRWLTEARKRTVTQIPTPTTPRQV | | |
| | REFLGTAGFCRLWIPGFATLAAPLYPLTKEKGK | | |
| | FIWTKEHQVAFETLKKTLLQAPALALPDLSKPF | | |
| | TLYIDERKGVARGVLTQALGPWKRPVAYLSKK | | |
| | LDPVASGWPSCLRAIAATATLIKDADKLTLGQK | | |
| | VTVVAPHALENIIRQPPDRWITNARITHYQSLLL | | |
| | TERVTFAPPAVLNPATLLPEADETPVHQCEEILA | | |
| | EEAGTWSDLTDQPWPGAETWFTNGSSFVKKGK | | |
| | RRAGAAVVDRRTVIWASSLPEGTSAQKAELIAL | | |
| | IQALKLAEGKSVNIYTDSRYAFATAHVHGAIYR | | |
| | QRGLLTSAGRDIKNKKEILDLLVAIHLPRKVAII | | |
| | HCPGHQKGTGPIEKGNQMADQMAKEAAHGPM | | |
| | TLIAKVGSRQDERALEKRALTEEEGLEYLT | | |
| 8153 | VLNLEEEYRLHEKPVPSSIDPSWLQLFPTVWAE | NP_056790 | Gibbon ape |
| | RAGMGLANQVPPVVVELRSGASPVAVRQYPMS | | leukemia virus |
| | KEAREGIRPHIQRFLDLGVLVPCQSPWNTPLLPV | | |
| | KKPGTNDYRPVQDLREINKRVQDIHPTVPNPYN | | |
| | LLSSLPPSHTWYSVLDLKDAFFCLKLHPNSQPLF | | |
| 8154 | AFEWRDPEKGNTGQLTWTRLPQGFKNSPTLFD | XP_0370593 | Peromyscus |
| | EALHRDLAPFRALNPQVVLLQYVDDLLVAAPT | 69 | leucopus |
| | YRDCKEGTQKLLQELSKLGYRVSAKKAQLCQK | | |
| | EVTYLGYLLKEGKRWLTPARKATVMKIPPPTTP | | |
| | RQVREFLGTAGFCRLWIPGFASLAAPLYPLTKES | | |
| | IPFIWTEEHQKAFDRIKEALLSAPALALPDLTKPF | | |
| | TLYVDERAGVARGVLTQTLGPWRRPVAYLSKK | | |
| | LDPVASGWPTCLKAVAAVALLLKDADKLTLGQ | | |
| | NVTVIASHSLESIVRQPPDRWMTNARMTHYQSL | | |
| | LLNERVSFAPPAVLNPATLLPVESEATPVHRCSE | | |
| | ILAEETGTRRDLKDQPLPGVPAWYTDGSSFIAE | | |
| | GKRRAGAAIVDGKRTVWASSLPEGTSAQKAEL | | |
| | VALTQALRLAEGKDINIYTDSRYAFATAHIHGAI | | |
| | YKQRGLLTSAGKDIKNKEEILALLEAIHLPKRVA | | |
| | IIHCPGHQKGNDPVATGNRRADEAAKQAALST | | |
| | RVLAETTKPQELI | | |
| | ALSLEEEYRLFEAEPPEKSPEELQNWLREFPQA | | |
| | WAETAGLGLARDQPPLMISLKASATPVSIRQYP | | |
| | MSREAHEGIKPHIRRLLDQGVLKPCQSPWNTPL | | |
| | LPVKKPGTGDYRPVQDLREVNKRVEDIHPTVPN | | |
| | PYNLLSTLPPTHVWYTVLDLKDAFFCLRLHPQS | | |
| | QLLFAFEWRDPEKGSSGQLTWTRLPQGFKNSPT | | |
| | LFDEALHADLAGFRVEHPTLTLLQYMDDLLLV | | |
| | ARSRTECMEGTRALLARLGQKGYRASAKKAQV | | |
| | CRDKVTYLGYTLSRGQRWLTGARKETIISIPPPR | | |
| | NPRQVREFLGTAGYCRLWIPGFAKLAAPLYPLT | | |
| | KPGTMFQWEEKHQKAFQQIKKALLEAPALGLP | | |
| | DLTKPFELFVDENSGFAKGVLVQRLGPWRRPV | | |
| | AYLSKKLDPVATGWPPCLRMVAAIAVLLKDAG | | |
| | KLTLGQPLTVLASHAVEALVRQPPDRWLSNAR | | |
| | MTYYQALLLDSDRVNFGPIVSLNPATLLPLPSPS | | |
| | EEHDCLQILAEAHGTRPDLTDQPLKDPDAVWY | | |
| | TDGSSFLEEGERRAGAAITTESEVVWASSLPPGT | | |
| | SAQRAELIALTQALRMAEGKKLTVYTDSRYAF | | |
| | ATAHVHGEIYRRRGLLTSAGKEIKNKKEILDLL | | |
| | KALFLPLQLSIVHCPGHQKDDSAVARGNRLADL | | |
| | TARTVASQPAGSSQLMAIQEPQPERDPVPYSPE | | |
| | DHELAKKMGSDWEQRRQAYILGDRMVMSTSH | | |
| | TRYMLR | | |
| 8155 | TLKLEDEYKLHDDPRPTPENIDQWLAKYPEAW | XP_0088533 | Nannospalax |
| | AETNGMGLAKQQPPLVISLKASVTPANVKQYP | 49 | galili |
| | MTIEAQQGIRPHIKRLLEQGILIPCQSAWNTPLLP | | |
| | VKKPGGTDYRPVQDLREVNKRVEDIHPTVPNP | | |
| | YNLLSTLPPSHAWYTVLDLKDAFFCLKLHPSSQ | | |
| | PLFAFEWKDPELGLSGQLTWTRLPQGFKNSPTL | | |
| | FDGALHQDLAAFRTQYPHLIILQYVDDILLAAET | | |
| | KEECLEGTGALLQELGQLGYRASAKKAQLCKK | | |
| | EVTYLGYQLKEGQRWLTKARQQTILSIPAPKDR | | |
| | KQVREFLGTAGFCRLWIPGFAEMAAPLYPLTKA | | |
| | SEGFTWENEHQRAFENIKQALLTAPALGLPDLN | | |
| | KPFELYVDEKTGYAKGVLTQKLGPWRRPVAYL | | |
| | SKKLDPVASGWPPCLRMVAALAVLVKDAFKLT | | |
| | LGQPLCIRAPHALESLIRQPPDRWLSNTRMTHY | | |
| | QALLLDTDRIQFGSPVALNPATLLPSTEEPDHHD | | |
| | CLQILAEVFGTRPDLKDQPLDNADYTWYTDGSS | | |
| | FLKGSQRRAGAAVTSKDKVIWAKPLPEGTSAQ | | |
| | KAELIALTQALRLAEGKSLNVYTDSRYAFATAH | | |
| | IHGEIYRRRGLDL | | |
| 8156 | TCPLSEESRLLPLTFSPDRPSTTSTPTSLTLLNHF | XP_0277130 | Vombatus |
| | KGLVPGVWAETNPFGLAGHQPPVVVQLSSTAT | 74 | ursinus |
| | PACVQQYPLTRAALLGIKPHIDRLLAAGILRPCQ | | |
| | SSWNTPLLPVRKPGSGDFRPVQDLREVNARVET | | |
| | VHPTVPNPYTLLSSLDPARTWYTVLDLKDAFFSI | | |
| | PLAPVSQPIFAFTWTDPNTGTSSQLTWTRLPQGF | | |
| | KNSPTLFGSALASDLAAFRVSYPEVTLLQYVDD | | |
| | LLLATSSEAICKDATLHLLQLLEASGYRISGKKA | | |
| | QLCSQSVVYLGFTLRSGQRLLSRGRVAAILGMP | | |
| | APRNRRGLREFLGMAGYCRLWILGFAEVAKPL | | |
| | YEALTGEPTQFVWGPRQQEAFDKLRKALSSTPA | | |
| | LSLPDLSKPFRLYVSESRAVAKGVLTQPLGPWN | | |
| | RPVAYLSKQLDPVASGWPSCLRTVAAIAVLVRE | | |
| | AAKLTFGQPLEISASHHLEQLLHSPPTRWISNSR | | |
| | LTHYQSLLLDSARISFAPPVTLNPATLLPDSPPSS | | |
| | PIHDCLDTLDSIHTSRPGLTDVPLTNPDLVLFTD | | |
| | GSSFVQEGIRRAGAAVVTPVETLWDTALPPGTS | | |
| | AQRAELIALTQALRLSAGRRVNIYTDSRYAFAT | | |
| | VHIHGYVYLQRGLLTSAGREIRNKSQIQDLLDA | | |
| | VWLPKEVAVIHVPAHTRGTDPQSLGNAAADKA | | |
| | ARAAACKPLIPAM | | |
| 8157 | TAPLEEEYRLFLEAPIQNVTLLEQWKREIPKVW | YP_223871 | Reticulo |
| | AEINPPGLASTQAPIHVQLLSTALPVRVRQYPITL | | endotheliosis |
| | EARRSLRETIRKFRAAGILRPVHSPWNTPLLPVR | | virus |
| | KPGTSEYRMVQDLREVNKRVETIHPTVPNPYTL | | |
| | LSLLPPDRTWYSVLDLKDAFFCIPLAPKSQLIFA | | |
| | FEWTDAEEGESGQLTWTRLPQGFKNSPTLFDEA | | |
| | LNRDLQGFRLDHPSVSLLQYVDDLLIAADTQAA | | |
| | CLSATRDLLMTLAELGYRVSGKKAQLCQEEVT | | |
| | YLGFKIHKGSRTLSNSRTQAILQIPVPKTKRQVR | | |
| | EFLGTIGYCRLWIPGFAELAQPLYAATRGGNDP | | |
| | LEWGEKEEEAFQSLKLALTQPPALALPSLDKPF | | |
| | QLFIEETGGAAKGVLTQALGPWKRPVAYLSKR | | |
| | LDPVAAGWPRCLRAIAAAALLTREASKLTFGQ | | |
| | DIEITSSHNLESLLRSPPDRWLTNARITQYQVLLL | | |
| | DPPRVRFKQTAALNPATLLPETDDTLPIHHCLDT | | |
| | LDSLTSTRPDLTDQPLAQAEATLFTDGSSYIPHG | | |
| | KRYAGAAVVTLDSVIWAEPLPIGTSAQKAELIA | | |
| | LTKALEWSKDKSVNIYTDSRYAFATLHVHGMI | | |
| | YKERGLLTAGGKAIKNAPEILALLTAVWLPKRV | | |
| | AVMHCRGHQKDDAPTSAGNRRADEVAREVAI | | |
| | RPLSIQATVFDAPDMP | | |
| 8158 | TVLLPPTYHKQLSCQTKNTLNIDEYLLQFPDQL | NP_045937 | Walleyedermal |
| | WASLPTDIGRMLVPPITIKIKDNASLPSIRQYPLP | | sarcoma virus |
| | KDKTEGLRPLISSLENQGILIKCHSPCNTPIFPIKK | | |
| | AGRDEYRMIHDLRAINNIVAPLTAVVASPTTVL | | |
| | SNLAPSLHWFTVIDLSNAFFSVPIHKDSQYLFAF | | |
| | TFEGHQYTWTVLPQGFIHSPTLFSQALYQSLHKI | | |
| | KFKISSEICIYMDDVLIASKDRDTNLKDTAVML | | |
| | QHLASEGHKVSKKKLQLCQQEVVYLGQLLTPE | | |
| | GRKILPDRKVTVSQFQQPTTIRQIRAFLGLVGYC | | |
| | RHWIPEFSIHSKFLEKQLKKDTAEPFQLDDQQV | | |
| | EAFNKLKHAITTAPVLVVPDPAKPFQLYTSHSE | | |
| | HASIAVLTQKHAGRTRPIAFLSSKFDAIESGLPPC | | |
| | LKACASIHRSLTQADSFILGAPLIIYTTHAICTLL | | |
| | QRDRSQLVTASRFSKWEADLLRPELTFVACSAV | | |
| | SPAHLYMQSCENNIPPHDCVLLTHTISRPRPDLS | | |
| | DLPIPDPDMTLFSDGSYTTGRGGAAVVMHRPVT | | |
| | DDFIIIHQQPGGASAQTAELLALAAACHLATDK | | |
| | TVNIYTDSRYAYGVVHDFGHLWMHRGFVTSA | | |
| | GTPIKNHKEIEYLLKQIMKPKQVSVIKIEAHTKG | | |
| | VSMEVRGNAAADEAAKNAVFLVQRVLK | | |
| 8159 | TTLVPLQEYEERLLKQTMLTGSYKEKLQSLFLK | YP_001956722 | African green |
| | YDALWQHWENQVGHRRIKPHHIATGTVNPRPQ | | monkey simian |
| | KQYPINPKAKASIQTVINDLLKQGVLIQQNSIMN | | foamy virus |
| | TPVYPVPKPDGKWRMVLDYREVNKTIPLIAAQ | | |
| | NQHSAGILSSIFRGKYKTTLDLSNGFWAHSITPE | | |
| | SYWLTAFTWLGQQYCWTRLPQGFLNSPALFTA | | |
| | DVVDLLKEVPNVQVYVDDIYISHDDPREHLEQL | | |
| | EKVFSLLLNAGYVVSLKKSEIAQHEVEFLGFNIT | | |
| | KEGRGLTETFKQKLLNITPPRDLKQLQSILGLLN | | |
| | FARNFIPNFSELVKPLYNIIATANGKYITWTTDN | | |
| | SQQLQNIISMLNSAENLEERNPEVRLIMKVNTSP | | |
| | SAGYIRFYNEFAKRPIMYLNYVYTKAEVKFTNT | | |
| | EKLLTTIHKGLIKALDLGMGQEILVYSPIVSMTK | | |
| | IQKTPLPERKALPIRWITWMSYLEDPRIQFHYDK | | |
| | TLPELQQVPTVTDDIIAKIKHPSEFSMVFYTDGS | | |
| | AIKHPNVNKSHNAGMGIAQVQFKPEFTVINTWS | | |
| | IPLGDHTAQLAEVAAVEFACKKALKIDGPVLIV | | |
| | TDSFYVAESVNKELPYWQSNGFFNNKKKPLKH | | |
| | VSKWKSIADCIQLKPDIIIIHEKGHQPTASTFHTE | | |
| | GNNLADKLATQGSYVVNINTTPSLDAELDQLLQ | | |
| | GQYP | | |
| 8160 | TTLVPLQEYQERLLKQTALPEREKKILHSLFLKY | YP_009666126 | Guenon simian |
| | DALWQHWENQVGHRRIKPHHIATGTVNPRPQK | | foamy virus |
| | QYPINPKAKPSIQIVINDLLKQGVLIQQNSVMNT | | |
| | PVYPVPKPDGKWRMVLDYREVNKTIPLIAAQN | | |
| | QHSAGILSSIVREKYKTTLDLSNGFWAHSITPES | | |
| | YWLTAFTWQGKQYCWTRLPQGFLNSPALFTAD | | |
| | VVDLLKEVPNVQAYVDDIYISHNDPKEHLEQLE | | |
| | KVFSLLLNAGYVVSLKKSEIAQYEVEFLGFNITK | | |
| | EGRGLTDTFKQKLLNITPPKDLKQLQSILGLLNF | | |
| | ARNFIPNFSELVKPLYNIIAIANGKFIQWTEENSQ | | |
| | QLQYIISVLNSAENLEERNPEVKLIMKVNTSPSA | | |
| | GYIRFYNESAKRPIMYLNYVYTKAEIKFTNTEK | | |
| | LLTTIHKGLIKALDLAMGQGILVYSPIVSMTKIQ | | |
| | RTPLPERKALPIRWITWMSYLEDPRIQFHYDKTL | | |
| | PELQNVPMVTGDEVAKTKHPSEFSMVFYTDGS | | |
| | AIKHPNINKSHSAGMGIAQVQFKPEFTVLNTWSI | | |
| | PLGDHTAQLAEVAAVEFACKKALKINGPVLIVT | | |
| | DSFYVAESANKELPYWQSNGFLNNKKKPLRHIS | | |
| | KWKSIAECIQLKPDISIIHEKGHQPTATTFHTEGN | | |
| | TLADKLATQGSYVVNSNTTPSLDAELDQLLQG | | |
| | RYP | | |
| 8161 | TVLVPLQDYQERLLKQTTLPKEQKDQLEKLFLK | YP_009513242 | Rhesus macaque |
| | YDALWQHWENQVGHRRIKPHNIATGTLAPRPQ | | simian foamy |
| | KQYPINPKAKPSIQIVIDDLLKQGVLIQQNSTMN | | virus |
| | TPVYPVPKPDGKWRMVLDYREVNKTIPLIAAQ | | |
| | NQHSAGILSSIYRGKYKTTLDLTNGFWAHPITPE | | |
| | SYWLTAFTWQGKQYCWTRLPQGFLNSPALFTA | | |
| | DVVDLLKEVPNVQAYVDDIYMSHDDPQEHLEQ | | |
| | LEKVFSILLNAGYVVSLKKSEIAQREVEFLGFNI | | |
| | TKEGRGLTETFKQKLLNVIPPKDLKQLQSILGLL | | |
| | NFARNFIPNYSELVKPLYTIVANANGKFISWTEE | | |
| | NSNQLQYIISVLNQADNLEERNPETRLILKVNSS | | |
| | PSAGYIRYYNEGSKRPIMYVNYVFSKAEVKFTQ | | |
| | TEKMLTTMHKGLIKAMDLAMGQEILVYSPIVS | | |
| | MTKIQKTPLPERKALPVRWITWMTYLEDPRIQF | | |
| | HYDKTLPELQQTPSVTEDVIAKTKHPSEFAMVF | | |
| | YTDGSAIKHPDINKSHSAGMGIAQVQFQPEYKV | | |
| | IHQWSIPLGDHTAQLAEIAAVEFACKKALKISGP | | |
| | VLIVTDSFYVAESANKELSYWKSNGFLNNKKKP | | |
| | LKHVSKWKSIAECLQLKPDITIIHEKGHQQPMTT | | |
| | LHTEGNNLADKLATQGSYVVHCNTTPSLDAEL | | |
| | DQLLQGHNP | | |
| 8162 | TVLVPLHEYQERLLQQTALPKEQKELLQKLFLK | YP_009508556 | Japanese |
| | YDALWQHWENQVGHRRIKPHNIATGTLAPRPQ | | macaque simian |
| | KQYPINPKAKPSIQIVIDDLLKQGVLIQQNSTMN | | foamy virus |
| | TPVYPVPKPDGKWRMVLDYREVNKTIPLIAAQ | | |
| | NQHSAGILSSIYRGKYKTTLDLTNGFWAHPITPE | | |
| | SYWLTAFTWQGKQYCWTRLPQGFLNSPALFTA | | |
| | DVVDLLKEIPNVQAYVDDIYISHDDPQEHLEQL | | |
| | EKIFSILLNAGYVVSLKKSEIAQREVEFLGFNITK | | |
| | EGRGLTDTFKQKLLNITPPKDLKQLQSILGLLNF | | |
| | ARNFIPNYSELVKPLYTIVANANGKFISWTEDNS | | |
| | NQLQHIISVLNQADNLEERNPETRLIIKVNSSPSA | | |
| | GYIRYYNEGSKRPIMYVNYIFSKAEAKFTQTEK | | |
| | LLTTMHKGLIKAMDLAMGQEILVYSPIVSMTKI | | |
| | QRTPLPERKALPVRWITWMTYLEDPRIQFHYDK | | |
| | SLPELQQIPNVTEDVIAKTKHPSEFAMVFYTDGS | | |
| | AIKHPDVNKSHSAGMGIAQVQFIPEYKIVHQWS | | |
| | IPLGDHTAQLAEIAAVEFACKKALKISGPVLIVT | | |
| | DSFYVAESANKELPYWKSNGFLNNKKKPLRHV | | |
| | SKWKSIAECLQLKPDIIIMHEKGHQQPMTTLHTE | | |
| | GNNLADKLATQGSYVVHCNTTPSLDAELDQLL | | |
| | QGHYP | | |
| 8163 | TVLVPLQEYQERLLKHTALPKEQVKQLEKLFLK | YP_009508551 | Eastern |
| | FDALWQHWENQVGHRRIKPHNIATGILTPRPQK | | chimpanzee |
| | QYPINPKAKPSIQIVIDDLLKQGVLIQQNSIMNTP | | simian foamy |
| | VYPVPKPDGKWRMVLDYREVNKTIPLIAAQNQ | | virus |
| | HSAGILSSIYRGKYKTTLDLTNGFWAHPITPESY | | |
| | WLTAFTWQGKQYCWTRLPQGFLNSPALFTADV | | |
| | VDLLKEVQNVQAYVDDIYISHDDPQEHVEQLE | | |
| | KVFSILLNAGYVVSLKKSEIAQREVEFLGFNITK | | |
| | EGRGLTDTFKQKLLNITPPKDLKQLQSILGLLNF | | |
| | ARNFIPNYSELVKPLYTIVANANGKFITWSEENS | | |
| | NQLQRIISVLNQAENLEERNPETRLIIKINSSPSA | | |
| | GYIRYYNEGSKRPIMYVNYVFSKAEMKFTHTE | | |
| | KLLTTMHKGLIKAMDLAMGQEILVYSPIVSMTK | | |
| | IQKTPLPERKALPVRWITWMTYLEDPRIQFHYD | | |
| | KSLPELQQIPNVTEDVIAKTKHPSEFSMVFYTDG | | |
| | SAIKHPDVNKSHSAGMGIAQAQFQPEYKVLHQ | | |
| | WSIPLGDHTAQLAEIAAVEFACKKALKVSGPVL | | |
| | IVTDSFYVAESANKELSYWKSNGFLNNKKKPLK | | |
| | HVSKWKSIAECLQLKPDIVIIHEKGHQPSMTTLH | | |
| | TEGNNLADKLATQGSYVVHCNTTPSLDAELDQ | | |
| | LLQGHNP | | |
| 8164 | TILVPLQEYQDRILNKTALPEEQKQQLKALFTK | NP_056803 | Simian foamy |
| | YDNLWQHWENQVGHRKIRPHNIATGDYPPRPQ | | virus |
| | KQYPINPKAKPSIQIVIDDLLKQGVLTPQNSTMN | | |
| | TPVYPVPKPDGRWRMVLDYREVNKTIPLTAAQ | | |
| | NQHSAGILATIVRQKYKTTLDLANGFWAHPITP | | |
| | DSYWLTAFTWQGKQYCWTRLPQGFLNSPALFT | | |
| | ADAVDLLKEVPNVQVYVDDIYLSHDNPHEHIQ | | |
| | QLEKVFQILLQAGYVVSLKKSEIGQRTVEFLGF | | |
| | NITKEGRGLTDTFKTKLLNVTPPKDLKQLQSILG | | |
| | LLNFARNFIPNFAELVQTLYNLIASSKGKYIEWT | | |
| | EDNTKQLNKVIEALNTASNLEERLPDQRLVIKV | | |
| | NTSPSAGYVRYYNESGKKPIMYLNYVFSKAELK | | |
| | FSMLEKLLTTMHKALIKAMDLAMGQEILVYSPI | | |
| | VSMTKIQKTPLPERKALPIRWITWMTYLEDPRIQ | | |
| | FHYDKTLPELKHIPDVYTSSIPPLKHPSQYEGVF | | |
| | CTDGSAIKSPDPTKSNNAGMGIVHAIYNPEYKIL | | |
| | NQWSIPLGHHTAQMAEIAAVEFACKKALKVPG | | |
| | PVLVITDSFYVAESANKELPYWKSNGFVNNKKE | | |
| | PLKHISKWKSIAECLSIKPDITIQHEKGHQPINTSI | | |
| | HTEGNALADKLATQGSYVVNCNTKKPNLDAEL | | |
| | DQLLQGNNV | | |
| 8165 | TVLVPLEQYKERILKETALEGQFKQQLQNILSTF | YP_ | Simian foamy |
| | DTLWQHWENQVGHRKIPPHNIATGTHPPRPQK | 009508888 | virus |
| | QYPINPKAKESIQIVINDLLKQGVLIQQNSIMNTP | | Pongopygmaeus |
| | VYPVPKPDGRWRMVLDYREVNKTIPLIAAQNQ | | pygmaeus |
| | HSAGILASIYRGTYKTTLDLANGFWAHPITPNSY | | |
| | WLTAFTWQGKQHCWTRLPQGFLNSPALFTADV | | |
| | VDLMKHIPNVQVYVDDLYLSHDDPQEHLQVLQ | | |
| | QVLHILHDAGYVVSLKKSAIAQKVVEFLGFNIT | | |
| | KTGRGLTDAFKEKLLNISPPQNLKQLQSILGLM | | |
| | NFARNFIPNYAERVKPFYSLISTAKSNNILWNDE | | |
| | LTSQLQELITLLNQADNLEERKPTTRLIIKVNSSS | | |
| | HAGYIRYYNEGSKKPILYINYVFSKAEEKFSMLE | | |
| | KLLTTLHKALIKAVDLAMGTEIMVYSPIVSMTK | | |
| | IQKTPLPERKALPVRWITWMTYLEDPRITFHYD | | |
| | KTLPELKDVPSVYQNDIPIVPHPSQYSMVFYTD | | |
| | GSAIKNPNPTKTHSAGMGVVQGKFNPEFQVVN | | |
| | QWSIPLGNHTAQLAEVAAVEFACKQALKITGPV | | |
| | LIITDSFYVAESANKELPYWKSNGFVNNKKKPL | | |
| | KHVSKWKSIADCLSLKTGITIKHEKGHQPSHTS | | |
| | VHTEGNALADKLATQGSYVVNNIIKPSLDAELD | | |
| | QVLQGNLP | | |
| 8166 | TIRVPIEEYKERIIQQSTLPRDYKDKLRTLLEKYN | YP_ | Central |
| | ILWQHWENQVGHRRIFPHNIATGTCKPKPQRQY | 009508546 | chimpanzee |
| | PINPKARASIQVVIDDLLKQGVLIKQTSVMNTPV | | simian foamy |
| | YPVPKPDGRWRMVLDYREVNKTIPLIGAQNQH | | virus |
| | SLGLLTTLVREKYKTTLDLANGFWAHPITPESY | | |
| | WITAFTWQGLQYCWTRLPQGFLNSPALFTADV | | |
| | VDLLKEIPNVQVYVDDLYISHEDPQEHLDVLDK | | |
| | IFQKLKDAGYVVSLKKSEIAQSTVEFLGFNITKE | | |
| | GRGLTESFKTKLLDLKPPETLKQLQSILGLLNFA | | |
| | RNFVSNFSELVKPLYQLISTAKGNNISWSNENTK | | |
| | QLQQLISALNNADNLEERKPDVKLIVKLNASPS | | |
| | AGYIRFYNETGKKPIMYINYVFTKAEIKFSPLEK | | |
| | LLVTLHKALIKALDIAMGKEILVYSPIVSMTKIQ | | |
| | KTPLPERKALPIRWITWMTYLEDPRISFYYDKTL | | |
| | PELKLVPEVQEKEKIIASRHPSQYTSVFYTDGSAI | | |
| | RSPDVSKAHSAGMGVVQGYFDPEFKISNSWSVP | | |
| | LGDHTAQYAEVCAVEFACKKALSVSGPVLIITD | | |
| | SFYVAESATKELPYWRSNGFLTNKKKPLKHVS | | |
| | KWKVIADCLQSKPDIVILHEKGHQPNNTSIHTEG | | |
| | NALADKLATQGSYTVNNIQNPSLDAELDQILQG | | |
| | NFP | | |
| 8167 | TVKLPVQDFKKELINKANINNEEKKQLAKLLDK | YP_ | Yellow-breasted |
| | YDILWQQWENQVGHRKIPPHNIATGTVAPRPQR | 009508582 | capuchin simian |
| | QYHINTKAKPSIQQVIDDLLKQGVLVKQTSVMN | | foamy virus |
| | TPVYPVPKPDGKWRMVLDYRAVNKTIPLIGAQ | | |
| | NQHSLGILTNLVRQKYKSTIDLSNGFWAHPITK | | |
| | DSQWITAFTWEGKQHVWTRLPQGFLNSPALFT | | |
| | ADVVDLLKDIPGISVYVDDIYFSTETVSEHLKIL | | |
| | EKVFKILLEAGYIVSLKKSALLRHEVTFLGFSITQ | | |
| | TGRGLTSEFKDKIQNITPPKTLKELQSILGLFNFA | | |
| | RNFVPNFSEIIKPLYSLISTAEGNNIKWTSEHTRH | | |
| | LEEIVSALNHAGNLEQRDDESPLVVKLNASPKT | | |
| | GYIRYYNKGGQKPIAYASHVFTNTESKFTPLEK | | |
| | LLVTMHKALIKAIDLALGQPIEVYSPIVSMQKLQ | | |
| | KTPLPERKALSTRWITWLSYLEDPRIIFHYDKTL | | |
| | PDLKNVPETITEKQPKILPIIEYAAVFYTDGSAIR | | |
| | SPDKNKSHSSGMGIVQAIFKPELTIEHQWTIPLG | | |
| | DHTAQYAEISAVEFACKKANNISGPVLIVTDSD | | |
| | YVARSVNEELPFWRSNGFVNNKKKPLKHISKW | | |
| | KNISDSLLLKRDITIVHEPGHQPSHTSIHTQGNNL | | |
| | ADKLATQGSYNVNSIVKNPSLDAELEQLINGHS | | |
| | M | | |
| 8168 | TIKLPVQDLKNTLVSQANIGKEDKIKLAKLLDK | YP_ | Spider monkey |
| | YDDLWQQWDNQVGNRKITPHNIATGTYPPKPQ | 009508561 | simian foamy |
| | KQYHINPKAKPSIQIVINDLLKQGVLRQSTSPMN | | virus |
| | TPVYPVPKPDGKWRMVLDYRAVNKTIPLIAAQ | | |
| | NQHSLGILTNLIRHKYKSTIDLSNGFWAHPITED | | |
| | SQWITAFTWEGKQHVWTRLPQGFLNSPALFTA | | |
| | DVVDILKEVPGVSVYVDDIYISSPTMEEHFQVL | | |
| | DSIFRKLLETGYIVSLKKSALARYEVNFLGFVISE | | |
| | TGRGLTSEFRERLQEITPPTTLKQLQSILGFLNFA | | |
| | RNFVPNFSELVQPLYQLISTASGNFIQWTAEHTL | | |
| | RLNELISALNHAGNLEQRRGDSPLVVKVNASDK | | |
| | TGYIRYYNDNSLIPIAYASHVFSTAELKFTPLEK | | |
| | LLVTMHRALLKGIDLALGQPIKVYSPIASMQKL | | |
| | QKTPIPERKALSTRWVTWLSYLEDPRITFYYDK | | |
| | TLPDLKHVPASTDNNIITLLPITEYEAVFYTDGS | | |
| | AIKSPKTEQTHSAGMGIVMVVYTPEPNITQQWS | | |
| | IPLGDHTAQYAEISAVEFACKKASLLQGPVLIVT | | |
| | DSDYVARSANKELPFWRSNGFLNNKKKPLKHIS | | |
| | KWKNISDSLLLKRNITIVHEPGHQPSKTSIHTLG | | |
| | NSLADKLAVQGSYSVNTINKIPSLDAELNQILEG | | |
| | NLP | | |
| 8169 | TIKLPVQEQKDSLVSQANIKKEDKIKLAKLLDK | YP_ | White-tufted-ear |
| | YDALWQNWENQVGNRKITPHNIATGTEPPRPQ | 009508577 | marmoset simian |
| | KQYHINPKAKPSIQIVINDLLKQGVLKQVTSPM | | foamy virus |
| | NTPVYPVPKPDGKWRMVLDYRAVNKTIPLIAA | | |
| | QNQHSLGILTNLVRHKYKSTIDLSNGFWAHPITS | | |
| | DSQWITAFTWEGKQHVWTRLPQGFLNSPALFT | | |
| | ADVVDILKEIPNVSVYVDDIYFSSPTVEEHLDTL | | |
| | EKIFDKLLQAGYIVSLKKSALARYEVNFLGFAIS | | |
| | ETGRGLTSEFKERLQEITPPTTIKQLQSIMGFLNF | | |
| | ARNFIPNFSELVQPLYQLIATASGNFIHWTTEHT | | |
| | LRLREIISALNHAGNLEQRVGDSPLVIKVNASDR | | |
| | TGYIRYYNDGSIVPIAYASHVFSSAEQKFTPTEK | | |
| | LLVTMHRALLKGLDLALGQPIRVYSPVASMQK | | |
| | LQKTPLPERKALSTRWVTWLSYLEDPRITFFYD | | |
| | KSLPDIKTFLPQLLLNAYMLPITQYEAVFYTDGS | | |
| | AIKAPKLTQAHSAGMGIVMVIFNPEPTVKQQWS | | |
| | IPLGDHTAQYAEISAVEFACKKASLLTGPVLIVT | | |
| | DSDYVARSANDELPFWRSNGFLNNKKKPLKHIS | | |
| | KWKNISDSLLLKRNITIVHEPGHQPSKTSIHTFG | | |
| | NSLADKLAVQGSYTVNTVHTPSLDAELNQILNK | | |
| | DFP | | |
| 8170 | TIKLDLEEQQGTLLNNSILSKKGKEELKQLFEKY | YP_ | Feline foamy |
| | SALWQSWENQVGHRRIRPHKIATGTVKPTPQK | 009513249 | virus |
| | QYHINPKAKPDIQIVINDLLKQGVLIQKESTMNT | | |
| | PVYPVPKPNGRWRMVLDYRAVNKVTPLIAVQN | | |
| | QHSYGILGSLFKGRYKTTIDLSNGFWAHPIVPED | | |
| | YWITAFTWQGKQYCWTVLPQGFLNSPGLFTGD | | |
| | VVDLLQGIPNVEVYVDDVYISHDSEKEHLEYLD | | |
| | ILFNRLKEAGYIISLKKSNIANSIVDFLGFQITNEG | | |
| | RGLTDTFKEKLENITAPTTLKQLQSILGLLNFAR | | |
| | NFIPDFTELIAPLYALIPKSTKNYVPWQIEHSTTL | | |
| | ETLITKLNGAEYLQGRKGDKTLIMKVNASYTTG | | |
| | YIRYYNEGEKKPISYVSIVFSKTELKFTELEKLLT | | |
| | TVHKGLLKALDLSMGQNIHVYSPIVSMQNIQKT | | |
| | PQTAKKALASRWLSWLSYLEDPRIRFFYDPQMP | | |
| | ALKDLPAVDTGKDNKKHPSNFQHIFYTDGSAIT | | |
| | SPTKEGHLNAGMGIVYFINKDGNLQKQQEWSIS | | |
| | LGNHTAQFAEIAAFEFALKKCLPLGGNILVVTD | | |
| | SNYVAKAYNEELDVWASNGFVNNRKKPLKHIS | | |
| | KWKSVADLKRLRPDVVVTHEPGHQKLDSSPHA | | |
| | YGNNLADQLATQASFKVHMTKNPKLDIEQIKAI | | |
| | QACQNNERLP | | |
| 8171 | TTLVPLQEYQERLLKQTALPNKEKTMLQSLFLR | YP_ | Guenon simian |
| | YDALWQHWENQVGHRRIKPHHIATGTVPPRPQ | 009666126 | foamy virus |
| | KQYPINPKAKPSIQVVINDLLKQGVLVQQNSTM | | |
| | NTPIYPVPKPDGKWRMVLDYREVNKTIPLIAAQ | | |
| | NQHSAGILSSIFRGKYKTTLDLSNGFWAHPITPE | | |
| | SYWLTAFTWQGQQYCWTRLPQGFLNSPALFTA | | |
| | DVVDLLKEIPNVQAYVDDIYISHDDPVEHVQQL | | |
| | EKVFSLLLNAGYVVSLKKSEIAKHEVEFLGFNIT | | |
| | KEGRGLTDTFKQKLLNITPPKDLKQLQSILGLLN | | |
| | FARNFIANFSELVRPLYNIVSSANGKYITWTQEN | | |
| | SQQLQNIISTLNSAKNLQERNPEVRLVMKVNTS | | |
| | PSAGYIRFYNEATKQPIMYLNYVYSKAETKFTM | | |
| | TEKLLTTIHKGLIKALDLAMGQEILVYSPIVSMT | | |
| | KIQKTPLPERKALPIRWITWMSYLEDPRIQFYYD | | |
| | KTLPELLQVPKVTEDEIAKTKHPSEFNMVFYTD | | |
| | GSAIKHPNIKKSHSAGMGIAQVQFKPDFTIVNT | | |
| | WSIPLGDHTAQMAEIAAVEFACKKALKITGPVL | | |
| | VVTDSFYVAESANKELPYWQSNGFVNNKKKPL | | |
| | KHVSKWKSIAECLQLKPDIVIMHEKGHQPSNTT | | |
| | FHTEGNNLADKLATQGSYVVNTNTTPSLDAEL | | |
| | DQLLQGHTP | | |
| 8172 | IAQKAINIFEKVQVFQRKIYLSTKADNKRKFGVL | WP_2022638 | Enterococcus |
| | YDKVYRKDILKVAWFYVKRNKGSAGIDDFTIEE | 42 | faecium |
| | JEAYGVQKFLDEIEDQLRNKKYQPKAVKRVYIP | | |
| | KANGKKRPLGIPTVRDRVVQTAVKIVIEPIFEAD | | |
| | FQEFSYGFRPKRSANQAIREIYKYLNYGCEWVI | | |
| | DADLKGYFDTIPHDKLLLLVKERVTDKSIIKLLS | | |
| | LWLEAGIMEDNQVRSNILGTPQGGVISPLLANIY | | |
| | LNALDRYWKNNRLEGRGHDAHLIRYADDFVIL | | |
| | CSNNPKKYYQYAKQRIDKLGLTLNEEKTRIVHA | | |
| | TEGFDFLGYTLRKSKSHKSGKYKTYYYPSRKS | | |
| | MKSIKGKVKDVIQTGQHLNLPDVMERLNPMLR | | |
| | GWANYFKAGNSKQHFKSIDNYVIYNLTIMLRK | | |
| | KHKKSGKGWREHPPSWYYNYFGLVCLRKLSTN | | |
| | INDDSQRYGR | | |
| 8173 | KKGKPIYVPNSFGEELGKKIKRKVAKKYTFDNF | A0A0H1A76 | Aquamicrobium |
| | IYHFKDGSHVVALHRHRKNAFFCRVDISRFFYS | 8 | sp.LC103 |
| | VKRNRLKRVLKSIGISKAEHYAKWSTVKNPFDG | | |
| | GGYVLPYGFIQSPILATLVLAESPIGAFLRGLPET | | |
| | ITPSVYMDDLCLSGQDEAELKVAFDGLVAAVV | | |
| | DAGFTLNDEKTREPAPQIDIFNCSLESGSTVVLP | | |
| | ERIEEFF | | |
| 8174 | FELKYRTRGKWIFVPTDQCERKGRRIIQYFSRFK | UPI000365A | Bradyrhizobium |
| | FPDYFYHYQPGGHIAALHAHLQHKLFFKIDIQN | 698 | sp.WSM2793 |
| | FYYSIARMRVTRALRSHAYPGANTLAKWSTVR | | |
| | NPYGGPLAHVLPIGFVQSPLLASLVLMKSPVAE | | |
| | AIERARKSGVTISVYMDDFIGSHDDEATLQAAY | | |
| | ADIRDASVRAGLLPNPAKLVAPTAAITAFNCDL | | |
| | SFGAANVSIDRVAKY | | |
| 8175 | TVKFETYRYSYLRKGKPVFVPSERGEAIGRELK | A0A2E4Z3C8 | Mesorhizobium |
| | AKVEAAINFEDIYYHLREGGHVAALHAHRDHR | | |
| | YFARVDIERFFYGISRNRVARELHGIGIEKAGYF | | |
| | AKWSCVKNPFEEPRYALPYGFVQSPILATLVLT | | |
| | RSGVGAFLRGLPENVTASVYMDDIALSCDDAE | | |
| | ALQATYAGLRAALEESNFAINEDKAQRPAEAIE | | |
| | LFNCALSQRFTSVLQARRDDFF | | |
| 8176 | LENYKEKYKHEGKFIFVPNYECIRKGLRIVEFCR | UPI000660A | Microvirga |
| | DRLEFPDCFYHYRNGGHVAALHRHLDNRFFFRI | 62D | massiliensis |
| | DLQNFYYAISRNRVCAALHASGFHKARTYGKW | | |
| | SCVRNPVAEDPRYSLPIGFVQSPALASLVLMRSP | | |
| | IMGAISAAERDSVFISVYLDDLIGSSTDFSLLERA | | |
| | YYTILEACGAANLQVNARKLLPPASEIHAFNCV | | |
| | LKHGLAEVTDERIRKFV | | |
| 8177 | TVAIRNYSFKYDRRGKPVFAPSNVGRRIGNEVK | A0A0Q6K2A | Sphingorhabdus |
| | EAVEGAFAFSPLYFHFRAGGHVAAIHHHRPHRF | 2 | pulchriflava |
| | FARIDISRFFYSISRRRVQSALDRIGVANAAFYA | | |
| | KWSTVTNPFEAPRYALPYGFVQSPILASLVLASS | | |
| | SVGEHLSSLSPDVTVSVYVDDISLSADRLDALQ | | |
| | AAYDATLAVLESDGFLVSADKLRPPAAAIDVEN | | |
| | CDLAQGLSKVQDDRINQFMADLPSHEAE | | |
| 8178 | PVQFQNFDYTYQRNGKPVFAPSPLGRQIGEDIK | UPI00068F6 | Sphingomonas |
| | EQVEAKYQFDDFVFHLRKKGGHVAALHSHRPH | D74 | sp.Leaf339 |
| | GYFARVDIRRFFYSVARNRVQRALATIGIPRAR | | |
| | HYAKWSCVKNPYDLPTYSLPYGFVQSPILASLV | | |
| | LMESAVGSFLRGLVAENHVTVSVYMDDISLSSD | | |
| | DLPRLQAAFNRLVHDLAEARFQVSPAKLRPPGP | | |
| | VMDLFNCDLRQGETVVREERIDLFEAEPQSH | | |
| 8179 | YDHHFALKPGTRVYIPTEMGRKRGTEIKGAIEG | UPI000C80A | Tsuneonella |
| | LWKPPANYFHLLEGGHVAAVKSHRNATWLAS | 9D7 | flava |
| | LDLQRFFDQITRTKIHRALKVIGLPHQDAWEMA | | |
| | CDSTVDKKPPKRHFSLPFGFVQSPIVASVVLAQS | | |
| | ALGGAIRNLVAGGLTVTVYVDDITISGSSEEQVF | | |
| | AAVEQLETGAELAGLAFNPEKTQLPNGAVTSFN | | |
| | IAFGSGALEVKEDRMAEFEVAIRNGNEYQIEGIL | | |
| | GYVGSVNHGQA | | |
| 8180 | KWLHKFERKPGRWVFEPSPEARAEGVEVKELV | IOHPP5 | Burkholderia |
| | ESHWKAPSYYFHLRQGGHVAALMRHQRSTCFV | | lessedis |
| | KVDIADFFGSVSRSRISRVLKEFVSHAEARRIAT | | |
| | ASTVQHPEDPARQILPYGFVQSPLLASLALHKSG | | |
| | LGKYLDQLHRENSVVVTVYVDDIIVSGNDPEEL | | |
| | GDVLTTMKTKAQRSRLAFSDDKEQGPAATISAF | | |
| | NIELAAGTPLSVLPPKLAEFREAFQASTSELQRA | | |
| | GIQGYVRSVNPVQA | | |
| 8181 | KRWEHRFQVKSGRWVFVPTPASRAVGEQIRAR | UPI000C157 | Stenotrophomonas |
| | VAKAWSPPAFYYHLRKGGHVAALRAHADSTY | 4FC | maltophilia |
| | FFRCDLKNFFGSINLSRVTRCLKRYFSYVEARG | | |
| | MASASVVIAPGATKTMLPYGFVQSPLLASLALD | | |
| | QSRAGAYLRKLSAQEGITVSVYMDDIVVSSLEI | | |
| | GLLDKIKAELGEKAEKAGISLNQEKTEGPSTLVT | | |
| | VFNVELSHNSLVISEERMAEFREALMIASCDAV | | |
| | AMGILGYVASVNDAQLSKLY | | |
| 8182 | RNFNHKIDLGNGKWAYVQEKHLIPHARRMTNL | A0A1V1UJF | Roseovarius |
| | HIERARFPKFYFHFHSGGHVMASKLHSENSFFSHI | 8 | sp. A-2 |
| | DLERFFYHVSKNKIVRSMKKVGFGFREAEGFAV | | |
| | VSTVRSEKGFTLPFGFVQSPALAALVLDQSQLG | | |
| | KTLREIAPNVQTTLYGDDILLSSKNEKTLREASD | | |
| | NVLLACQKANFPTNQEKTKVVQTKITAFNINISR | | |
| | NCLEITEERMNDFYVNIRHLGNCPTTQGILGYVS | | |
| | RVNQRQAE | | |
| 8183 | KWLSRFRLKSNTWVYVPTFETVKEGKLFKKAIE | UPI0009C18 | Pseudomonas |
| | FKWIPPTNYYHLRSGGHVEAVKYHLGGKFFVH | C3C | lurida |
| | ADISKFFNSINRSRITRELKPYFGYERSRAIAMES | | |
| | TVSIPVDSGQIFALPFGFVQSTIIASLCLRKSSLGK | | |
| | TIDVLNKTDGIRVSVYVDDIVVSTQCLEKAKAA | | |
| | FLMIQKSAERSGFLLNKEKSQGPSDKITAFNIDL | | |
| | RQNFMEVTSWRFSELLSSYKDATSDKKKSGIW | | |
| | GYVNSVNSAQASML | | |
| 8184 | WSNRFEIKPGRWVYNPTKESRLIGQKIIKLINKS | A0A1E5DOI7 | Vibrio genomo |
| | WKKPPYYYHLRCGGHVEALAIHLENQFFATVDI | | sp. F6 |
| | SDFFGHISRSRITRALKPIVGYEVARKIAKLSTIK | | |
| | TTENYTHSHHLPYGFNQSPILASICLFNSTLGKY | | |
| | LETAANDENITVSVYMDDIVISSQNEELLTQTFD | | |
| | QIFFTAKKSKFVINENKTKPVAKQTEAFNIVITH | | |
| | GDMKIEYDRLVKFQHAYSGSNSEHQRHGIGSY | | |
| | VGSVNKAQAKLL | | |
| 8185 | WKNRFEVKPGTWVYEPTLESKKYGRELITQIRK | UPI00073E7 | Vibrio |
| | KWKAPEYYYHLRDGGHVKALEKHTANNFFAS | 897 | parahaemolyticus |
| | LDIKDFFGSISRTRVTRTLKPLFGYDIARKLAKLS | | |
| | SVKNDGSKAHSHSIPYGYVQSPILASICLHKSTF | | |
| | GSELDSCFNDQNVTISVYVDDIVISSNDKKLLKH | | |
| | WCERLKNAAKRSKFTLNALKESPADSTVVAFNI | | |
| | EVTHNSMVITKERFKLLYEAYQNSQSIMQRKGI | | |
| | GGYVGTVNKSQARLLDL | | |
| 8186 | DKWIHKFEIKEGRWVYVPSEKTREIGGKIHFYIK | A0A502GKH | Ewingella |
| | HKWNYPLYMYHLRKGGHVAAANRHIKKQYFS | 5 | americana |
| | LIDISDFFGSTSQSRVTRELGKLIPYAKAREIAKL | | |
| | STVRSPPSNGLKHVIPYGYPQSPILATLCFHQSFC | | |
| | GKLINIISKSGQISVSIYMDDILLSSDDLSQLEIAF | | |
| | NSVKAALAKSGYCINERKTQSPSTMVKVENLEL | | |
| | SQQSLRVSPKRIVEFLQAYISSKNAAERKGIASY | | |
| | VGSVNKSQSTIFK | | |
| 8187 | KPTWLHKFEVKENRWVYIPDAETHHLGQKIHT | A0A6S5JQQ | Enterobacter |
| | YIKHKWKSPLYMFHLREGGHVAAANYHIKKKY | 2 | cloacae |
| | FSLIDISNFFGATSQSRVTRELGRLIPYVKAREIA | | |
| | RLSTVKNLNGNGLKHVIPYGYPQSPILASLCFHQ | | |
| | SFCGSTINTVSKSGHVSVSIFMDDILLSSDDLGQ | | |
| | LENAFDIILEAIRRSGYTVNENKTQPPSLMVNVF | | |
| | NLELSQNSLRVTSKRIVEFLQAFISSKNPHERKGI | | |
| | ASYVGSINTAQAKLFR | | |
| 8188 | ERWNSKFQIKKGAWVFIPTKETIDNGLQIKKLIE | A0A1H3PXH | Nitrosomonas |
| | KHWSFPKYYFHLIKGGHVRALHEHKKHKFFIHL | 4 | halophila |
| | DIKNFFGQINRSRVTRSLKEYVSYEKAREIAVES | | |
| | TVRLPESTEVKYILPFGFVQSPIIASICLSKSALGR | | |
| | HLTSLKQQNEYAVSIYMDDILVSANNSEKLMM | | |
| | EIMRIKAASEKSKLLLNAAKQVGPDTRIKAFNIE | | |
| | ISQDLLQITPSKLQELANTYATSENDHQRAGIFN | | |
| | YVLSVNPSQVEAF | | |
| 8189 | NTENEWLHKFEIKPGRWVYIPNEATLKQGKLIH | A0A7Y8YG | Kalamiella |
| | AYIRSKWKSPLYMFHLREGGHVAAANHHVQK | K8 | piersonii |
| | KYFALIDIQDFFGATSQSRITRALGNFIPYDKAR | | |
| | KIAKLSTVKNQNGNGLKHVIPYGYPQSPILASFC | | |
| | FHQSFCGDLIKNISKSGDISVSIYMDDILLSGNDL | | |
| | GRLEDTFKAVNEALVKSGYTVNRSKTQLPSTIV | | |
| | NVFNLELSQNSLRISAKRIVDFLQTYISSSHPPEK | | |
| | KGIASYVGSVNKEQARLFK | | |
| 8190 | TYEAKWINKFLLKPKKWVFVPSKQSKIIGKNIC | A0A259PL07 | Polynucleobacter |
| | RLLRKHWDPPEYFYHLRNGGHVEALRAHEQNQ | | sp.86C-FISCH |
| | YFSRLDIDNFFGSITRSRITRSLKKFVSYKTAWDI | | |
| | AHQSTVKDPDCISMRFMLPFGFIQSPLLASICLD | | |
| | QSFLGEFLKLLNKNPQLSLSVYMDDLVISSNDR | | |
| | DLLLSISADLKNAIVKSHWSSNEQKEDICKQLIM | | |
| | AFNIEISHQSTRISDPRMQEFKYSYKHAANSNSK | | |
| | LGIVNYIRSVNPVQG | | |
| 8191 | STPSDWLHKFEIKAERWVFVPSKETLKRGQKIH | A0A7T9UC3 | Serratia |
| | AYIKQKWKYPRYMFHLRNGGHVAAANFHLKS | 7 | plymuthica |
| | NYFSLIDVSDFYGTTSQSRVTRELGRLVPYVKA | | |
| | REIARLSTVVNPNRNGFKHVIPYGYPQSPILASL | | |
| | CFHHSFCGGVISSISKSERVFVSVYMDDILLSSD | | |
| | DMNLLVEAFDTVRQALRKSGYTLNENKTQPPS | | |
| | PKIQVFNLELGHNHLRVTPKRIVEFLKVFTSSSN | | |
| | EHERKGIASYVGSINKSQAKLFR | | |
| 8192 | EKWKHKFLLKENKWVHIPSEEMIKYGSALHRYI | A0A376EX1 | Cronobacter |
| | RKNWRFPLYYYHLRNGGHVAAARLHKRNNYF | 3 | universalis |
| | CLIDIKGFFESTSQSRVTRELKKIIPYDKARLIAK | | |
| | LSTVRLPNAVGHKFAVPYGYPQSPVLATLCLQN | | |
| | SYAGNVIDSFHRSGCVTVSVYMDDIILSCKSLVT | | |
| | LNQHFDVLCKALRKSRYELNASKTQSPAAKISV | | |
| | FNLELGHQHLKVESERMMLFIQAFAKSGNEHER | | |
| | KSIAKYVNTVNASQARHHFPK | | |
| 8193 | TIEVQRWEDKFEIKPGVWVYIPSVEARKVGGKI | A0A774SQ2 | Enterobacteriaceae |
| | LQAVRNKWIPPLYFYHLRTGGHLKAARLHLKS | 6 | |
| | DFFAVVDIKQFFQSTSRSRITRDLKSYFTYSQAR | | |
| | EISTFSTVRNLSHSPHKHVLPFGFVQSPILATLCL | | |
| | DKSYFGSLLRRLNKHHDLKLSVFMDDVIISSND | | |
| | LAQLQAAYDEALVAMRKSGYQANMSKTQAPS | | |
| | SKISVFNLTLSKGVMKVTSQKMSDFLIDFYSSN | | |
| | YEPHRIGVKNYVEAVNPGQAKLFKL | | |
| 8194 | TIEVQRWEDKFEIKPGVWVYVPSVEARKVGGKI | A0A5H7Z7D | Klebsiella |
| | LQDVRNKWIPPLYFYHLRTGGHLKAARLHLKS | 3 | pneumoniae |
| | DFFAVVDIKQFFQSTSRSRITRDLKSYFTYSQAR | | |
| | EISTFSTVRNLSHSPHKHVLPFGFVQSPILATLCL | | |
| | DKSYFGSLLRRLNKHHDLKLSVFMDDVIISSND | | |
| | LAQLQAAYDEALVAMRKSGYQANMSKTQAPS | | |
| | SKISVFNLTLSKGVMKVTSQKMSDFLIDFYSSN | | |
| | YEPHRIGVKNYVEAVNPGQAKLFKL | | |
| 8195 | TLELQRWKHKFEIKPGVWVFAPSPEAVKNGSKI | UPI000666D | Escherichia coli |
| | LNAVRKHWNPPLYFFHLRTGGHLKATRLHLKN | B4B | |
| | TYFAVVDIKQFFLSTSRSRVTRCLNEYFSYEKAR | | |
| | EISRYSTVKNPSSGLHKYVLPFGFVQSPILATLCL | | |
| | DKSYLGSLLRKLSRKGTMKLSIYMDDVIISSNDF | | |
| | QTLQTTYQEILQAMEKSGYKLNLKKSQPPSNKI | | |
| | VVFNISLRHGNMSVTAERLSEFLIDFYASNDEQ | | |
| | HKLGIANYVRSVNLEQAKLFR | | |
| 8196 | VKWEHRFELKKDKWVYVPTKEMRLYGTEIHN | A0A7Z8XG66 | Enterobacter |
| | HLRAKWIPPLYFYHLRDGGHVACAKKHLHNRY | | hormaeche |
| | FALIDIKNFFESTGQSRLTRELKTYLTYNNARQV | | |
| | AKLSTVRNPLPERPKYIIPYGYPQSPILSTFCLHK | | |
| | SFCGNLFKQLHVNPDIDISIYMDDIILSANDLSSC | | |
| | ESAYRLLSEGLERSGYQMNTLKSQFPSEKIHVF | | |
| | NLELKHNSLRVLPFRLIEFLIAYTKSKNRHERKG | | |
| | IASYVGSVNTDQAKLFK | | |
| 8197 | EIEVQRWEHKFEIRPGVWVYVPSVRTSELGERIL | A0A0V9E1K6 | Enterobacter |
| | QSIRNKWIPPLYFYHLRTGGHLKAARLHLKSSFI | | sp.50588862 |
| | AVIDIKHFFQSTSRSRITRDLKAYFTYSQAREIAK | | |
| | FSTVKNLSDTPHKHVLPFGFVQSPMLATFCLDK | | |
| | SHLGSLLRRLNKHPNVKLSVYMDDVIISSNDIV | | |
| | QLQTTYDEILLAMDKSGYQVNMIKTQAPSSLIK | | |
| | VFNLYLSKGNMKVTSQKMSDFLIDFYASDYEP | | |
| | HKIGVKNYVESVNPEQAKLLKL | | |
| 8198 | SNMAPRWINKFEIKPNVWVYEPSEACREEGAEI | UPI0005DB0 | Yersinia |
| | LRFINRKWKIPTYYYHLRRGGHVEALRVHIEND | 90F | enterocolitica |
| | WFVSLDIKEFFQSTSRSRVTRTLRNFLPYEKARII | | |
| | AKVSTVSNFTNDKFSHFIPFGYVQSPLLATICLH | | |
| 8199 | YSSFGQLIKELSRCEDVKLSVYMDDIILSSSSLEL | | |
| | LERTKTLLEESASRSHYKLNTLKVQGPAERITAF | | |
| | NIDLSHQSMVISPKRLLSFLVDFNSPDSDNLKRE | | |
| | GIRSYIYSVNSEQAEYF | | |
| | STIDVTLKEVADPIRLKLAWTKIKKKGSIGGVD | KPA10619.1 | Candidatus |
| | GVTISSFNANLEVNLSELSNQILTNQYTPEPLQA | | Magnetomorum |
| | AHIPKPGKSEKRQLGLPSLKDKIVQSSLASILSDF | | sp. HK-1 |
| | YEIHFSNCSYAYRPGKGSVKAIGRVRDFLNRKN | | |
| | YWIASVDIDNFFDSVDHEICTSILKEQISDQSIIRL | | |
| | ISLYFSSGMIKFDQWQDTEIGIPQGGAISPVISNIY | | |
| | LNKLDHFLHTLNAFFVRYADDIILFSNTQQSLSE | | |
| | TYQKTNEFLNKKLNLKLNALDNPIINVSKGFSFL | | |
| | GIYFHRCQLKIDFKRIDEKIEKMKYIIHKQKQID | | |
| | AVIKEINEFFNGVQRHYGNIIPDSYQLKNLESTV | | |
| | LDELSIFLAKMKNEGHINSKKACKLVLDPLVFM | | |
| | SERTKSQRDAVIDKIIADAFTIVDQKKDTDEKRI | | |
| | EKSVDSAIHQKRQAYAKKIATETE | | |
| 8200 | AGVQRTLPAETDGQDNGEASTFDLLERILSSNN | HHV47343 | Tissierellia |
| | MNAAYKQVVRNKGSHGIDGMKVDELLPHLKE | | bacterium |
| | NGNNLIEELKAGTYRPKPVRRVEIPKPDGGVRL | | |
| | LGIPTVVDRMIQQAIAQILTPIFDPEFSESSFGFRP | | |
| | GRSAHQAIKRAQEYMDEGYNWVVDIDLAKYF | | |
| | DTVNHDKLMALVARKVKDKRVLKLIREYLKA | | |
| | GVMINGVVIETEEGCPQGGPLSPLLSNIMLDELD | | |
| | KELEKRGHKFCRYADDCNIYVRSRKAAERTMQ | | |
| | SVTKFLEGKLKLKVNREKSAVDRPWKLKFLGF | | |
| | SFYRGKEGIRIRVHRKSIERVKEKIRNITSRSNGM | | |
| | SMDTRLLKLKQLIRGWVNYFRIADMKSLAQSL | | |
| | DEWTRRRLRMCIWKQWKRVRTRFQNLMKLGL | | |
| | DRQKALEFANTRKGYWRIANSPILSVTITNERLQ | | |
| | KRGYTGFVAELA | | |
| 8201 | LEQILARENLMTALHRVERNKGSHGVDGMPVQ | WP_080874617 | Oceanobacillus |
| | NLRAHIMEHWASIREQLETGTYYPQPVRRYEIH | | timonensis |
| | KEGGGMRKLGIPTVLDRFIQQAIAQVLTTIYDPT | | |
| | FSENSYGFRPKRRGHDAVRKARAYMKDGYRW | | |
| | VIDMDLEKFFDKVNHDRLMRTLSRRVKDPKVL | | |
| | QLIRRFLQAGIMEDGVVHPNTEGASQGGPLSPL | | |
| | LSNIVLDELDKELEKRGLHFVRYADDFHIYVRS | | |
| | KRAGHRIMESITNFIEKKMKLEVNKEKSAVDRP | | |
| | WKRKFLGFSFTFHKENPKIRIAKESIKRFKRRIRE | | |
| | LTSRKKSMNMGDRIEKLNQYLAGWLGYYQLA | | |
| | ETPTIFKELDGWIRRRLRMIRWKEWKKVKTKH | | |
| | KNLVKQGIKKGKAWEWANTRKSYWRTANSPIL | | |
| | HRALGDQYWSEQGLKSLTNSYLTKRWT | | |
| 8202 | LEQLLSRENLLQALKRVESNKGSHGVDGMTVK | WP_154118777 | Paenibacillus sp. |
| | SLREHIVQNWQKIRQAIEEGTYEPSPVRRVEIPK | | LC-T2 |
| | PNGGGVRKLGIPTVTDRMLQQAIAQVLTPWFDP | | |
| | PFSEHSYGFRPKRRGHDAVRKARTFMKEGYRF | | |
| | VVDLDLEKFFDRVNHDRLMMKIAEKVKDKKV | | |
| | LLLIRKYLQSGVMENGLVQPTREGAPQGGPLSP | | |
| | LLSNIVLDELDKELEKRGHRFVRYADDCNIYVK | | |
| | TLRAGERVKASVTRFIETRLKLKVNQAKSAVDH | | |
| | PWKRKFLGFSFSTDIEPKVRIAKQSLQKAKVRIR | | |
| | EITSRKKPMRMEERMKELNQYLMGWCGYFSLA | | |
| | DTPSIFQRMDAWIRRRLRMCLWKQWKNPRTKV | | |
| | KRLLSLGMPKGKAYEWGNTRKGYWRIAGSPIL | | |
| | SRALNNQYWESNGLKSLLDRYNSIRNIS | | |
| 8203 | LMKPILSRENLLNALKRVERNGGSYGVDKMST | WP_179156869 | Bacillus sp. |
| | QNLRLYIVEHWAELRNALQQGTYEPQPVRRVEI | | EB106-08-02- |
| | PKSNGGVRLLGIPTVLDRFIQQAITQTLTPIYDPT | | XG196 |
| | FSENSYGFRPQRRGHDAVRKAKGYIEEGYRWV | | |
| | VDIDLEKFFDKVNHDKLMGLLSKRIDDKTLLGL | | |
| | IRKFLNAGIMIGGVVSQNTEETPQGGPLSPLLSNI | | |
| | ILDVLDKELEDRGHKFVRYADDCNIYVKSKKA | | |
| | GIRTMEGITAFIEKGLSLKVNHDKSAVDRPWNR | | |
| | KFLGFSFTNRKEPKIRIAKQSIKRFKLKVKEITSR | | |
| | KSPIPMEIRIQKLNQYLVGWCGYYALADTPSVF | | |
| | KDLEGWIRRRLRLCYWKQWKLPKTRIRKLIGFG | | |
| | IDKHKAYEWGNTRKGYWRITNSPILSRALNNAF | | |
| | WRKEGLKSLYERYESLRHT | | |
| 8204 | LMERILSKENLLSALKRVERNKGSHGVDEMRV | WP_212605652 | Sporosarcina sp. |
| | QNLRTHIVNHWEPIKMELLKGDYEPQPVRRVEI | | Marseille-Q4063 |
| | PKPDGGVRLLGIPTVMDRFIQQAIAQILTSVYDP | | |
| | MFSDHSYGFRPKRSAHDAVRKAKGYLTEGNR | | |
| | WVVDIDLEKFFDKVNHDRLMGTLAKRIQDKRL | | |
| | LKLIRKYLKSGIMINGIVSASEEGTPQGGPLSPLL | | |
| | SNIVLDELDSELEKRGHKFVRYADDCNIYLKTK | | |
| | KAGSRVMNSVTSFIEKKLKLKVNLDKSAVDRP | | |
| | WKRKFLGFSFTFHKEPKVRIAKESLQRMKNKIR | | |
| | EITSRKKPCPLAYRIKKLNQYLMGWCGYFALA | | |
| | DTPSVFRNFDSWIRRRLRMCMWKAWKLPKTK | | |
| | VRKLTGLGIPKGKAYEWGNTRKSYWRISNSPIL | | |
| | HRALDNSYWNHQGLKSLSSRYEVLRNQP | | |
| 8205 | ERILSRGNLLSALKRVERNKGSHGVDGMSVQN | WP_126433867 | Bacillus |
| | LRRHIMEHWESLKAELLEGTYQPQPVRRVEIPK | | freudenreichii |
| | PDGGVRLLGIPTVTDRFIQQAIAQVLSSIYEPTFS | | |
| | NHSYGFRPNRSAHDAVRKTKEFIKEGKRWVVD | | |
| | IDLEKFFDRVNHDRLMGTLSKRIKDKRLLKLIRS | | |
| | YLKAGVMINGLVSANEEGTPQGGPLSPLLSNIV | | |
| | LDELDKELEKRGHAFVRYADDCNIYVNTQKAG | | |
| | SRVMASLTSFIEGKLKLKVNQGKSAVDRPWKR | | |
| | KFLGFSFTSGKEPKVRIAKESIKRMKQKIRDITSR | | |
| | KKPYPMEYRIEKLNQYLMGWCGYFALADTPSIF | | |
| | IRLDSWIKRRLRMCRWKEWKQPKTKMRKLIGL | | |
| | GVPKWQAYEWGNSRKGYWRISKSPILHKTLGN | | |
| | SYWSTQGLKSLISRYESLRHIS | | |
| 8206 | LLNQILSRENMLQALKRVEQNKGSHGVDWMP | WP_061797426 | Niallia circulans |
| | VQILRQHIVENWHSIREAIFKGTYEPMPVRRVEI | | |
| | PKSDGGVRLLGIPTVKDRLIQQAIAQVLSKIYDP | | |
| | MFSEHSYGFRPNRSAHDAVRKAKGYIKEGYRW | | |
| | VVDMDLEKFFDKVNHDRLMGTLAKRINDKPLL | | |
| | KLIRKYLQAGVMMDGVISSTEKGTPQGGPLSPL | | |
| | LSNIVLDELDKELESRGHKFVRYADDCNVYVKS | | |
| | KRAGERTRASIQRFIEKKLRLKVNEKKSAVDRP | | |
| | WKRKFLGFSFTSSKEPKIRIAKESLKRMKMKIRE | | |
| | ITSRKMPYSMRYRMEKLNQYLMGWCGYFALA | | |
| | DTKSLFIKLDGWIRRRLRMCQWKDWKKPKTRI | | |
| | RNLIHLGVPKGKAYEWGNSRKGYWRVSNSPIL | | |
| | DKTLDISYWNNQGFKSLQTRYKFLRHLS | | |
| 8207 | LMNQILSRENLLLALKRVERNKGSHGVDKMPV | WP_ | Lysinibacillus |
| | KFLRQHVVENWLTIKKQILEGTYQPQPVRRIEIP | 053592381 | |
| | KPDGGVRLLGIPTVTDRLIQQAIAQVLSNLYDPN | | |
| | FSNHSYGFRPKRSAHDAIREAKGYIKEGYRWVV | | |
| | DMDLEKFFDKVNHDRLMSTLAKKISDKPLLKLI | | |
| | RRYLQSGVMINGVVYDTDEGTPQGGPLSPLLSN | | |
| | IVLDELDKELEKRGHKFVRYADDCNIYVKTKR | | |
| | AGERVMASIKTFIEKTLRLKINEKKSAVARPWQ | | |
| | RKFLGFSFTSRKEPQVRIAKESIKRMKNKIRELT | | |
| | ARKKPFPMEYRIQQLNQYLIGWCGYFALADTK | | |
| | SIFESLDGWIRRRLRMCLWKDWKKPRTKVRNLI | | |
| | RLGVPDWKAYEWGNTRKSYWRISKSPILHRTL | | |
| | GNSYWSNQGLKSLQARYEILRYSS | | |
| 8208 | LLNQILSRENLLQALRRVEKNKGSHGVDKMPV | WP_ | Psychrobacillus |
| | QTLRQHMKDNWLSIKEQLLEGTYEPQPVRRIEIP | 142642771 | vulpis |
| | KPDGGVRLLGIPTVTDRLIQQAIAQVLSRLYDPT | | |
| | FSEHSYGFRPNRSAHDAVRKAKGYIKEGYRWII | | |
| | DMDLEKFFDKVNHDRLTSTLAKRINDKPLLKLI | | |
| | RKYLQSGVLINGIVLDINEGTPQGGPLSPLLSNIV | | |
| | LDELDKELEQRGHRFVRYADDCNIYVKSKRSG | | |
| | ERVMESVQTFIERKLRLKVNKKKSAVDRPWKR | | |
| | KFLGFSYTSNKEPKVRIAKESLQRMKKKIREITS | | |
| | RKKPYPMEYRIEQLNRYLIGWCGYFALADTKLI | | |
| | FGEIDGWIRRRLRMCLWKNWKKPRTKVRNLIR | | |
| | LGIPDGKAFEWGNTRKGYWRISNSPILSRALNN | | |
| | SYWSNQGFKSLQARYEILRYSS | | |
| 8209 | ERILSRENLLNAIKRVEKNKGKHGVDEMPVAAL | WP_ | Bacillaceae |
| | RGHIMLNWNELRKSLSEGTYIPSPVRRVEIPKPD | 061794427 | |
| | GKGKRKLGIPTVTDRFIQQAITQVLTKMYDPGF | | |
| | SECSFGFRPKRRAHQAVKLAQSYIEEGYRWVV | | |
| | DIDLEKFFDKVNHDKLMSKLAERINDRTLLKLI | | |
| | RRFLTSGVMEGGLVSPNLEGTPQGGPLSPLLSNI | | |
| | VLDELDTELERRGHRFVRYADDCNIYVKSKRA | | |
| | GERVMKAMTHFIEGKLKLKVNRDKSAVDRPW | | |
| | RRKFLGFSFTSNLKPKVRISPQSIKRFKDKIRKLT | | |
| | SRRRSIAMEVRIHDLNEYLVGWVNYYHLADTR | | |
| | SVITKLEGWVNRRLRMIRWKEWKLPRTKIKKLI | | |
| | ELGVPEGKAYKWGNTRKAYWRISKSPILHKTL | | |
| | GKAYWLSLGLKSISARYDLQRST | | |
| 8210 | DLMEQVVARENMWAALRRVEQNRGAPGVDG | EKP93788 | Thermaerobacter |
| | MTVEQLRGFLREQWSQVRAQLLAGTYKPQPVR | | subterraneus |
| | RVEIPKPGGGTRLLGIPTVLDRLIQQALLQVLTPI | | DSM 13965 |
| | FDPDFSEHSYGFRPGRSAHQAVEAARRHVEEGY | | |
| | AWVVDLDLEQFFDRVNHDVLMARVMRKVAD | | |
| | KRVRMLIRRYLQAGVMVGGVKVRTEEGTPQG | | |
| | GPLSPLLANILLDELDKELERRGHRFVRYADDC | | |
| | NIYVRSERAGHRVMAGVRRFLEKRLRLKINEQK | | |
| | SAVDRPWRRKFLGFSMYRGREGIRLRVAPQTV | | |
| | QRLKDRIRGLTSRTWPVSMPERIRRINAYLRGW | | |
| | LAYFRIADMAVLLRNVEGWLRRRLQACLWKQ | | |
| | WKRPRTRLRELRALGHPEWRVRQWALSRRGY | | |
| | WAMAGGPLNSALGKPYWLAQGLLSLTRCYHE | | |
| | LRRA | | |
| 8211 | ALLETILSRNNLITALKRVEANKGAPGIDGVPTE | WP_ | Caenibacillus |
| | QLRDDIRKHWKSIKRQLLEGTYKPAPVRRVEIP | 077616959 | caldisaponilyticus |
| | KPNGGVRLLGIPTVMDRFIQQAILQVLTPIFDPH | | |
| | FSPYSYGFRPKRRAHDAVRQAQKYIQEGYRYV | | |
| | VDIDLEKFFDRVNHDILMSRVARKVEDKRVLKL | | |
| | IRAYLKAGVMLEGVRVRSEEGTPQGGPLSPLLA | | |
| | NILLDDLDKELEKRGLKFCRYADDCNIYVRSPR | | |
| | AGQRVKQSVQKYLEKKLKLKVNEEKSAVDRP | | |
| | WKRKFLGFSFTSQREARIRLAPKSVQRFKNKIR | | |
| | QLTNPNWSLPMEERIRKLNQYTMGWMGYFALI | | |
| | ETPSPLKRLEEWIRRRLRLCRWHQWKRVRTRIR | | |
| | ELRALGLKEHEVFEIANTRKGAWRTTRTPQLHK | | |
| | ALGKAYWLKQGLKSLTQRYFELRQDWRTA | | |
| 8212 | ALLERILARDNLITALKRVEANRGAPGIDGVSTD | WP_ | Caldibacillus |
| | QLRDYIRTHWSSIRAQLLEGTYRPTPVRRVEIPK | 020154220 | debilis |
| | PNGGIRLLGIPTVMDRLIQQAILQELTPIFDPDFS | | |
| | PYSFGFRPGRSAHDAVRQAQRYIREGYRYVVDI | | |
| | DLEKFFDRVNHDILMSRVARKVKDKRVLKLIR | | |
| | AYLQAGVMIGGVKVQTEEGTPQGGPLSPLLANI | | |
| | LLDDLDKELEKRGLKFCRYADDCNIYVKSLRA | | |
| | GLRVKQGIQRFLEKKLKLKVNEEKSAVDRPWK | | |
| | RTFLGFSFTPEREARIRLAPKSIQRFKQRIRQSTN | | |
| | PNWSLPMEERIRRVNQYTMGWMGYFQLIETPSI | | |
| | LRNMEGWVRRRLRLCLWLQWKRVRTRMRELR | | |
| | ALGLNERTVLEIANTRKGAWRTTKTPQLHQAL | | |
| | GKSYWKAQGLKSLTQRYFELRQG | | |
| 8213 | CRKQNSERNSFGKVGVKPRGYRRGQSIDRQDLS | WP_ | Brevibacillus |
| | LVLRREKYRVELLEQILERKNLLEALKKVESNG | 198827538 | composti |
| | GAAGIDGVSTEHLRAYVVEHWEKIRQQLLDGT | | |
| | YKPAPVRRVEIPKPDGGVRLLGIPTALDRMLQQ | | |
| | AILQVLTPIFDPGFSPNSFGFRPGKRGHDAVRQA | | |
| | QRFIREGYRIVVDIDLEKFFDRVNHDILMSRVAR | | |
| | KVKDKRVLKLIRKYLKSGVMAGGIVSHTEEGTP | | |
| | QGGPLSPLLSNIMLDDLDKELERRGLHFSRFAD | | |
| | DCNIYVKTKRAGERVKASIERYLEGKLKLKVN | | |
| | KEKSAVERPWKRKFLGFSFTAQKEARIRISPKSL | | |
| | KRVKDKIRTLTKPTWSISMKERIQQLNQYLMG | | |
| | WIGYYALIETPKPLAELESWLKRRLRLCLWHQ | | |
| | WKRVRTRYRELRKLGLTHQQAFEIASTRKGAW | | |
| | RTSITPHLHKALGNAYWQSQGLKSVTQRYFEIR | | |
| | QGWRTA | | |
| 8214 | DLMEQILSRQNLLEALHRVESNKGAVGIDGVST | WP_ | Thermicanus |
| | EQLREYVMKHWGTIRQQLLEGTYKPSPVRRVEI | 039944322 | aegyptius |
| | PKPDGGVRLLGIPTVIDRLIQQAILQVLTPIVDPG | | |
| | FSPNSFGFRPNRRGHSAVRQAQRFIREGYRIVVD | | |
| | IDLAQFFDRVNHDILMSRVARKIKDKRVLKLIR | | |
| | AYLQSGVMTGGVCVSSEEGTPQGGPLSPLLGNI | | |
| | LLDDLDKELERRGLRFCRYADDCNIYVKTRRA | | |
| | GERIKASVTRFLEGRLKIKVNEEKSAVDWPWKR | | |
| | KFLGFSFTFEKEARIRLAPKSLKRVKNKIRELTTP | | |
| | TWSISMKERIRILNQYLMGWMGYYALIETPSIL | | |
| | KTLEQWTRRRLRLCLWHQWKRVRTRIRELRAL | | |
| | GLPERQVLEIANTRKGAWRTSQTPHLHKALGIA | | |
| | YWQSQGLKSLTQRYNELRQGWRTA | | |
| 8215 | RSRDGHRQQNTSQEGCQREVAVKPQGTVGVPS | WP_ | Thermobacillus |
| | PLPAQIAPSSRKAQDDLLEKMLERENLLKAYRK | 015253141 | composti |
| | VVQNGGAPGVDGVTVTELQAYLNTHWEAVKA | | |
| | ALLAGTYSPLPVRRVEIPKPGGGVRLLGIPTVM | | |
| | DRLLQQALLQVMEPIFDPHFSWHSYGFRPGKRA | | |
| | HDAVRQAQQYIQSGLRWVVDMDLEKFFDRVN | | |
| | HDILMARVARRIDDKRVLKLIRAYLNAGVMAG | | |
| | GVVVRTEEGTPQGGPLSPLLANILLDDLDKELT | | |
| | RRGLHFVRYADDCNIFVASKRAGERVMESVIRF | | |
| | VEGKLKLKVNRDKSAVDRPWNRKFLGFSFLSN | | |
| | KQATVRLAPKTIQRFKKKVREITDRSRPLTMEE | | |
| | RIHRLNRFMMGWIGYFRLAAAKNHCGNLDAW | | |
| | MRRRLRMCLWKQWKRPRTRLRNLRALGVPEW | | |
| | AARMMANSRRGPWEMSRNTNNALPTSYWEAK | | |
| | GLKSLLSRYLELC | | |
| 8216 | RSHEEQRQPNISQESCQQREAVKPSGYAGAPSSS | WP_ | Paenibacillus sp. |
| | SAQVAPSSREDQNNLLERLLEGDNLRLAYKRV | 083612306 | P32E |
| | VQNGGAPGVDHVTVANLQAYLKTHWETVKAE | | |
| | LLTGTYRPAPVKRVEIPKPGGGVRLLGIPTVMD | | |
| | RFLQQALLQVMNPIFDAQFSWYSYGFRPGKSA | | |
| | HGAVKQAQRYIQSGLRWVVDLDMEKFFDQVN | | |
| | HDMLMARVARKVADKRVLTLIRAYLNAGVMV | | |
| | DGKLERSWEGTPQGGPLSPLLANILLDDLDKEL | | |
| | TGRGLRFVRYADDCNIFVASKRAGERVKESVC | | |
| | RFVEGKLKLKVNREKSAVARPWHRKFLGFSFLS | | |
| | QKQATIRLAPKTISRFKEKIRELTNRTWSISMEE | | |
| | RISRLNRYMMGWIGYFRLASAKTHLQNLDQWI | | |
| | RRRLRMCLWKQWKRVRTRIRELRALGVPEWA | | |
| | CFMMGNSRRGVWEMSRNINNALRASYWEAKG | | |
| | LKSLLSRYLELG | | |
| 8217 | ERVLSQQNMHEALKQVRRNKGAAGIDGMETA | NCB17444 | Synergistales |
| | DLRPWLIEHWVRIREELLGGTYKPLPVRRVEIPK | | bacterium |
| | PDGGVRLLGIPTVVDRLIQQALHQELYHIFDPGF | | |
| | SESSYGFRKYHSARQAVEKARRYIGEGFRYVVD | | |
| | MDLEKFFDRVNHDMLMARVARKVTDKRVLKL | | |
| | IRAYLEAGVMTGGLFGETREGTPQGGPLSPLLA | | |
| | NIMLDDLDKELEKRGHRFVRYADDCNIYVRSR | | |
| | RAGERVMDGMRKFIENRLKLKVNEAKSAVDRP | | |
| | QNRKFLGFSFTGEKEPRIRIAPKALERFKNTVRR | | |
| | LTDRGRSTSTEERIRRLSEYLRGWAGYFRLAQT | | |
| | PSVFQKLDRWIRRRLRMCILKQWKNIRTKRRKL | | |
| | VSLGLSHDDAMKIASSRKGYWRLAETPQLHIA | | |
| | MGNRYFKTLGLVSLASG | | |
| 8218 | ASSRREQRQQKIPSGSYPQKEAVNPQGAGEAPS | NSW83172 | Syntrophothermus |
| | SLPAQTTGTTREANRTNLMEMVVERENMIRAL | | sp. |
| | KRVEANKGAAGVDGMKVEDLREYLKESWPEIR | | |
| | EQLLAGTYHPKPVRRVEIPKPDGGVRLLGIPTAL | | |
| | DRIIQQALLQILTPTFDPEFSPFSYGFRPYRKAEN | | |
| | AVRRAQEYISEGYRWVVDMDLEKFFDRVNHDI | | |
| | LMSRVARKVKDKRVLRLIRRYLQAGVMVNGC | | |
| | CVATEEGTPQGGPLSPLLANIMLDDLDRELMRR | | |
| | GHCFVRYADDCNIYVKSQRAGERVMESVKRFV | | |
| | EGELKLKVNLQKSAVDRPWKRKILGFSFTWDK | | |
| | EPRIRLAPKTIKRFKDKIRELTKRSRSQSMEDRIG | | |
| | ALNTYLMGWIGYFKLADTRSVLQSLDEWVRRR | | |
| | LRMCYLKQWKKPKTKLRNLIVLGIPADWAALIS | | |
| | GSRKGYWRLANTPQMNKALGLAFWRNQGLRS | | |
| | LVGRYDQLRFTS | | |
| 8219 | EEILADENLQEALQRVCANKGAAGIDGITTTEF | MBK8399227 | Leptospiraceae |
| | HKQMSEEWKETKQRLLLGKYKPKGVRRVEIPK | | bacterium |
| | PAGGIRMLGIPTVMDRFIQQAMLQRLTPIFDPEF | | |
| | SKFSYGFRPNKSAHDAVRQAKKYIEEGHKFVV | | |
| | DIDLEKFFDKVNHDILMHLVGKKIRDKRVLRLI | | |
| | GSYLRAGVMTNGVCIPNEEGTPQGGVISPILANI | | |
| | MLNELDKELEARGHKFCRYADDCNIYVKSMKA | | |
| | GERVKASITRFLNKKLKLKVNETKSAVDKPMN | | |
| | RKFLGFTFGNVDSVVIQISSQSLERVKNKIRELT | | |
| | NPMRSVSMEERIKVINRYIIGWLGYYSLIEVPETI | | |
| | ESIDGWLRRRMRSCQWQQWKKPKTRIRELIKL | | |
| | GLKESTARKMGYSRKGNWRCSRTPAMHKAMG | | |
| | IKHWKDRGLINLVARYEIYRESWRTA | | |
| 8172 | IAQKAINIFEKVQVFQRKIYLSTKADNKRKFGVL | WP_ | Streptococcus |
| | YDKVYRKDILKVAWFYVKRNKGSAGIDDFTIEE | 000561483.1 | |
| | IEAYGVQKFLDEIEDQLRNKKYQPKAVKRVYIP | | |
| | KANGKKRPLGIPTVRDRVVQTAVKIVIEPIFEAD | | |
| | FQEFSYGFRPKRSANQAIREIYKYLNYGCEWVI | | |
| | DADLKGYFDTIPHDKLLLLVKERVTDKSIIKLLS | | |
| | LWLEAGIMEDNQVRSNILGTPQGGVISPLLANIY | | |
| | LNALDRYWKNNRLEGRGHDAHLIRYADDFVIL | | |
| | CSNNPKKYYQYAKQRIDKLGLTLNEEKTRIVHA | | |
| | TEGFDFLGYTLRKSKSHKSGKYKTYYYPSRKS | | |
| | MKSIKGKVKDVIQTGQHLNLPDVMERLNPMLR | | |
| | GWANYFKAGNSKQHFKSIDNYVIYNLTIMLRK | | |
| | KHKKSGKGWREHPPSWYYNYFGLVCLRKLSTN | | |
| | INDDSQRYGR | | |
| 8220 | GTANELPLLEQALSDDRLLAGWERVRANAGGP | WP_ | Tibeticola |
| | GVDGVTVEQFGGKVLRALAGLRQRVTASHYQ | 124224144.1 | sediminis |
| | ALPLRRIEITRPGKAPRVLAVPCVADRVVQSAV | | |
| | ALTISPRLDPGFEDFSFGYRPGRSVPRAVQHLAE | | |
| | ARDSGLVWVAEADIQSCFDRIPWAALLQRLGE | | |
| | VLPDAGLLALIQHWLSLPLQWPDGHQQVRCMG | | |
| | VPQGSPLSPLLSNVFLDGMDKELAAGPWRVIRY | | |
| | ADDFVIAAASREEARRGLAQAARWLRRLGLRL | | |
| | NLDKTRVIHFDQGFSFLGVRFRGRQMSAVQPG | | |
| | AEPWVLPRATQPRPHSPSSKPAQHSRSPAPTAR | | |
| | ASAPATPPSAQPEPLGPAAPSPNAAASAQPSQPR | | |
| | AADATLQDLQRLSVAPPNEPSPPRLRT | | |
| 8221 | STLPTPSSTDQDSPPPFWTLARLAEALEHVSARQ | KFB76584.1 | Candidatus |
| | GGAGADEQTLAEFAADAEAQLGLLALQLTQGS | | Accumulibacter |
| | YRPAPARLIPVAKPGGGVRELLLPAVRDRIVQS | | sp. SK-02 |
| | ALARYLADLLEPDFGEASHAYRPGHSVATALH | | |
| | RLQALRDGGLVFVAVCDIHHFFDSVDHRRLFSL | | |
| | LDDLPLERRLREQMKTCVRIEVADVQGQGAWS | | |
| | LARGLAQGSPLSPVLANLFLMAFDAACARAGL | | |
| | ALVRYADDCVLACASETEAQSALAFAADALEN | | |
| | IGLALNTRKSRLASFAEGFEFLGAFCGAEGMLG | | |
| | GRPGEAACLPPTTGPVHEAAAADDERPPSHGHR | | |
| | PRLR | | |
| 8222 | NPTSDILERIAESSKSHTDGVFTRLYRYLLREDIY | WP_ | Butyricicoccus |
| | FTAYKNLYANAGASTKGTDDDTADGFGAKYV | 087017951.1 | porcorum |
| | SDIIESLRNLEYSPKPVRRIYIPKHNGKLRPLGIPS | | |
| | FRDKLIQDAIRQILEAIYEPIFSDDSHGFRPGRSC | | |
| | HTAFDRIKYGFNGTKWFIEGDIKGCFDNIDHKV | | |
| | LLNILSKKVKDSKLINLIGAFLKAGYMEEWKYF | | |
| | QTYSGTPQGGILSPILANIYLHELDKKVAEIKQR | | |
| | FDSNEPKKYTEEYGGICHRISTLHRKSKNNPDSP | | |
| | DREKWIAEEVELKRQRVKIPVYQDNNKRICYVR | | |
| | YADDFLIGVVGSKEDCVEIKAELKDFLAAELKL | | |
| | ELSDEKTKITHSSESARFLGYDVSVRRSQELKRR | | |
| | SDGVKQRTLNGTVMLNAPLKDKIEEFLISNGYG | | |
| | VRTADGRIVPIATKGLRNRSDFEIVSTYNSQMR | | |
| | GICNYYRMASNFPKLDYFVYIMEYSCLKTLASK | | |
| | HQTTMAKARGDRRTGKRWGVPYETKTGTKTLI | | |
| | FLNMTDIRKSRKAKLDNVDAVPKSVSKQNEIKN | | |
| | RLNAGICELCGCDSEPVVVHHVQSLKALKGKS | | |
| | AWERKMRSIRRKTLIVCETCHNKIHNKTFC | | |
| 8223 | KPTSEILERMYRNSEEHSDGIYTRLYRYLLREDI | CDB92781.1 | Acidaminococcus |
| | YMTAYKNLYANKGAGTEGVDNDTADGFGKEY | | intestini |
| | VNQIIDELKNQTYEPKAVKRVYIPKRNGKMRPL | | CAG:325 |
| | GIPSFRDKLIQDAIRQILEVIYEPVFSTHSHGFRPN | | |
| | RSCHSALKEISRSFRSTKWFVEGDIKGCFDNIDH | | |
| | TVLLNLLSEKIKDSKFINLIGKFLKAGYMDNWE | | |
| | YHKTYSGTPQGGILSPILANIYLHELDKKVEAM | | |
| | QKEFNAPADYAYTPAYGKKVRGIVKLQKRYGE | | |
| | CVDEAEKKELLKQIHKLEVEKRRLPYKDASDK | | |
| | KIAYVRYADDFIIGVSGSREDAERIKQELTLFVA | | |
| | TRLKLELSDEKTKITHSSGNAHFLGYDINVRRC | | |
| | QESKRKTNGVLQRTLNNSVELLIPMERIEKFMY | | |
| | DREIVIQGKDGKLIPWQRNSMAGLTDLEIVDTY | | |
| | NSQTRGICNYYCIASNFSKLTYFVYLMEYSCLK | | |
| | TLAKKHKTRISGIKRIFKCGKSWGIPYKTKKEKK | | |
| | RMMIVKFSDFKRGTVFDEPSIDTVKNHIHFNTR | | |
| | NSLEARLKACKCELCGAEGDGIAFEIHHINKMK | | |
| | NLKGKEQWEMAMIARKRKTLVVCKECHKKIH | | |
| | HSS | | |
| 8224 | KPTSEILERMYQNSAKHTNGVYTRLYRYLLRED | WP_ | Anaeromusa |
| | IYLTAYKKLYANKGAGTKGVDNDTADGFGME | 018704816.1 | acidaminophila |
| | YVHQIIDELKNQTYMPKPVRRTHIPKQNGKMRP | | |
| | LGIPSFRDKLVQDVIRQFLEAIYEPIFSDRSHGFR | | |
| | PNRSCHTALKQISRSFRGAKWFVEGDIKGCFDNI | | |
| | DHAVLLNLLSEKIKDSKFVTLIGKFLKAGYLEA | | |
| | WQYHATYSGTPQGGILSPILANIYLHELDKKVE | | |
| | QLKQDFSRPAEKVRTTIYSTKAREIERVRKLYA | | |
| | DCVSDEERKEVLDKIQKLKTEIRTLPYKDATDK | | |
| | KLAYVRYADDFIISVCGTREECEEIKQQLKSFLS | | |
| | EKLKLELSDDKTKITHSSENARFLGYDVNVRRN | | |
| | NECKRKGNGTIQRTLNNSVELLVPFEKIERFMFE | | |
| | RKIVKQDKDGTLIPWQRLSMYGLTDLEVLDTY | | |
| | NSQTRGICNYYSLASNFAKLKYFVYLMEYSCLK | | |
| | TLAQKHKTRISAIKRKYKAGHSWGIPYETKNGA | | |
| | KKMMSIKFSDLNKSAIFNGEVDKITHHAHFTNA | | |
| | NSLENRLKMKKCELCGADSNTTFEIHHINKLKN | | |
| | LKGKEQWERAMIARKRKTLVVCKSCHNGIHHS | | |
| | S | | |
| 8225 | KPTIEILTRLQENSKNNHEEVFTKLFRYLLRPDIY | OLA23482.1 | Faecalibacterium |
| | YVAYQNLYANNGAATKGVDEDTADGFSEDKV | | sp. |
| | NRIIEALRNGTYEPKPVRRTYIKKKNGKMRPLG | | CAG:74_58_120 |
| | LPTFTDKLVQDVIRMVLQAIYEPVFSNYSHGFRP | | |
| | GRSCHTALAQLKHEFIGAKWFVEGDIKGCFDNI | | |
| | DHSVLIGIVGKKVKDARFINLLRLFLKAGYMEE | | |
| | WKYYGTYSGCPQGGIISPILANIYLNELDTFVEK | | |
| | LKKSFDTNTPYTLTPQYRALQNKRANTKQKINR | | |
| | REVGEERDQLIAQYIGLGKELRKTPAKLCNDKK | | |
| | LKYVRYADDFLIAVNGSKEDCEWIKAQLTEFIR | | |
| | GTLKMELSQEKTLITHSNDCARFLGYDVRVRRD | | |
| | QQVKPWKNCKQRTMNNTVELLIPFRDKIEKYLF | | |
| | AKGAVKQRPDNGKLEPVARIGLTRNTDLEIVTT | | |
| | YDAELRGLCNFYYLASNYRNLNYFSYLMEYSC | | |
| | LKTLAWKHKCKLSKIYDKYRIGAKRWGIPYET | | |
| | KSGRKVRKLTKFNEVDGKRCEDAIPTIVTIIAKS | | |
| | RTTIDSRLKACRCELCGYEGKDRKYEVHHVNK | | |
| | VKNLKGKEPWEIVMIAKRRKTLVVCHECHQKI | | |
| | HHGY | | |
| 8226 | KPTMEILTKLQENSKKHHDEVFTRLFRYMLRPD | WP_ | Amphibacillus |
| | IYFVAYQHLYANRGAGTKGINEETADGFSEKYV | 017472863.1 | jilinensis |
| | EQIIEALRTETYRPKPVRRTYIKKSNGKMRPLGL | | |
| | PTFTDKLVQEVIRMILESVYEPIFSNNSHGFRSGR | | |
| | SCHTALTQIKNQFIGARWFVEGDIKGCENNIDHT | | |
| | ILTKIIGKKIKDARFIKLVHLFLKSGYMENWKYY | | |
| | GTYSGCPQGGIISPILANIYLNELDNFMEKIKQDF | | |
| | DNRTPYQLTAEYKKVMNKRSSLSQKIKRCEAG | | |
| | ARRDGFIEEYNNLSQQIYKIPAKLCNDKKLMYV | | |
| | RYADDFLIAVNGNKQDCEWIKAKLTEFIHNDLN | | |
| | MELSQEKTLITHSSICARFLGYDVRIRRSQQIKA | | |
| | WKKTKQRTMNNSVELLIPLEDKIQSFLFSRGIVR | | |
| | QRKDNGKMEPFRRNSLLRQTDLEIVSTYDAELR | | |
| | GICNYYSLAVNYSKLNYFSYLMEYSCLKTLATK | | |
| | HRTKISKIISKCRMANKRWGIPYQTKSGMKRKR | | |
| | LTKIYEIDRKKCEDIFPRAITIYAKGKTTFDDRLK | | |
| | AKVCEVCGRTDSERYEIHHVNKVKNLKGKEPW | | |
| | EQIMIAKRRKTMVVCHECHQKIHHGF | | |
| 8227 | KPTVEILTKLQENSKKHHDEVFTRLYRYLLRPDI | WP_ | Clostridioides |
| | YYEAYQHLYSNKGAGTKGITEDTADGFSEKYV | 022618695.1 | difficile |
| | ERIIELLKAETYLPKPVRRTYIKKSNGKMRPLGL | | |
| | PIFADKLVQEAIRMILEAVYEPVFIDYSHGFRPG | | |
| | RSCHTALAQIKKEFTGARWFIEGDIKGCFDNISH | | |
| | AVLVEVIGRKIKDARFLKLIRSFLKAGYMENWK | | |
| | YHETCSGCPQGGIISPILANIYLNELDQYIMKLK | | |
| | KDFDVTAKAPYTPEYSRIIWKRQRLHNRIKDSE | | |
| | GMEREQLIDEYKSATAQMFKIPAKLCEDKKIKY | | |
| | VRYADDFLIAVNGSRQECEVIKGQLTEFVHNTL | | |
| | KMELSQEKTLITHSNTPARFLGYDVRVRRDQQI | | |
| | KPKGRFKTRSMNNKVELNIPFKDRIEKFLFANGI | | |
| | VEQRKDNGKLEPCKRPQLLNMTDLEIVTVYNA | | |
| | ELRGICNYYGIASNFNKLIYFNYLMEYSCLKTLA | | |
| | NKHCSKISKVREMYKDGTGEWGIPYQTKKGMK | | |
| | RMYFAKYSDCKGKRFTDIIPQQAKNHSHNTTTF | | |
| | ESRLKAKACEICGCTDSDKYEIHHVNKLKNLKG | | |
| | KTKWEQVMIAKRRKTIVVCHKCHMVIHHGGK | | |
| | KE | | |
| 8228 | KSTMEILTKLQENSQKNQDEVFTRLYRYLLRPD | WP_ | Faecalibacterium |
| | IYFIAYQHLYSNKGAGTKGVNDDTADGFSEQY | 097783669.1 | prausnitzii |
| | VTAIIEALRTGSYEPKPVRRTYIQKKNGKLRPLG | | |
| | LPVFADKLVQEAIRMILEAIYEPIFSIYSHGFRPG | | |
| | RSCHTALAMIKHEFTGAKWFIEGDIKGCFDNID | | |
| | HSTLIGVLNRKIKDARFLNLIRMFLKSGYMEDW | | |
| | DFHETYSGCPQGGIISPILANVYLNELDRYITQL | | |
| | KKEFDHGYNPRNFTEEYNAIRHKRDALHEKIKK | | |
| | AEGTMREQLIAQHKQLTKQLFRTPAKACTDKR | | |
| | LKYVRYADDFLIAVNGTREECEAIKAKLTDFVR | | |
| | DTLKMELSQEKTLITHSNTPARFLGFDVRVRRD | | |
| | ASVKRSGKRKMRTMNNKVELNIPLKDKVETYL | | |
| | LSHSIAKRDRKRLIPIHRPILLNRTDLEIVMIYNA | | |
| | ELRGLCNYYAIASNFNKLVYFGYLMEYSCLKTL | | |
| | ANKHRSRISKVRYEYRDGTGAWGVPYETKKGK | | |
| | RRMMFAKYSDCKGKDLTEKVPDLAYRYSHNT | | |
| | TSFEERLKAKVCEVCGCTDSDSYEIHHVNKVKN | | |
| | LKGKADWEKVMLAKRRKTIVVCHKCHMRIHH | | |
| | GTKTE | | |
| 8229 | KPTTEILVNISKNSSKNKDEVFTRLYRYMLRPDL | 1947404.3. | |
| | YFIAYKNLYANKGASTQGIDNDTADGFSKEKID | peg.615 | |
| | RIIQSLSDESYQPKPVRRKYIQKKGNSKKKRPLG | | |
| | IPTFTDKLVQEVLRMILEAVYEPIFSNNSHGFRPE | | |
| | KSCHTALNSIKKEFTGTTWFVEGDIKGCFDNIN | | |
| | HHVLVDIIGRKIKDARLIKLVWKFLRAGYIEDW | | |
| | KYHTTYSGSPQGGIISPLLANIYLNELDKFAEKT | | |
| | AKAFYKKRDREHTKEYDAVMNALVLVKYHLK | | |
| | KATGQQKSDLLKQKKRLQRQLRKIPCSSQTDK | | |
| | VMKYVRYADDFIIGVKGDKIDCEKIKKQFADFI | | |
| | SQELKMELSEEKTLITHSSQFARFLGYDIRVRRD | | |
| | NTVKPHGTHLQRTMNMKVELCIPFQDKIMPFLF | | |
| | NKSIIRQLKDGTLEPIARKYLYSCTDLEILTAFNA | | |
| | ELRGICNYYALASNYNRLRYFAYFMEYSCLKTI | | |
| | AGKHKTTARKIISKYSYDGSWRIPYKTKEGIKYS | | |
| | KFADFMKCKKVTDFDEVIKDYAVMHASTRTTF | | |
| | EDRLSAEVCELCGKINAPLEIHHVNKVKNLKGK | | |
| | DFWEIMMIAKKRKTIAVCKECHHKIHHP | | |
| 8230 | QPTIEILDRIRKNSRDNKEEIFTRLYRYLLRPDLY | WP_ | Enterocloster |
| | YLAYKNLYANKGAGTKGVNDDTADGFSKEKV | 002592887.1 | clostridioformis |
| | DRIIQSLADGTYTPNPVRRKYIQKKQNSTKKRPL | | |
| | GIPTFTDKLVQEVLRMILESVYEPIFSNNSHGFRP | | |
| | NRSCHTALKSLKREFSGVSWFIEGDIKGCFDNID | | |
| | HQVLANVINAKIKDARLIQLIWKFLKAGYMED | | |
| | WQYHATYSGCPQGGIVSPILANIYLNELDKFVE | | |
| | KTAKEFYKSRDRHHTPEYDKVTWQIKKAQKQL | | |
| | KTATGQEKTALLQKIAQLKAVMHKTPCMSKTD | | |
| | KVIKYIRYADDFILGVKGDKADCGRIKRQLSDFI | | |
| | SQTLKMELSEQKTLITHSNQYARFLGYDIRVRR | | |
| | DQKLKPHGNHVSRTLNGSVELCIPFADKIMPFLF | | |
| | GKSVIRQLRDGTIEPTARKYIFRCTDLEIVSTYNS | | |
| | ELRGICNYYSIASNFNKLQYFEYLMEYSCLKTL | | |
| | AGKHESTSRKMMRKYRDGNGSWGVPYQTKAG | | |
| | IKRRSFARFMDCKNTDLWTDKIIDFAIAHIGSRT | | |
| | SFDDRLSARVCELCGKTNVPLEIHHVNKVKNLK | | |
| | GKQLWELAMIAKKRKTLAVCKDCHHKIHHP | | |
| 8231 | QPTTAILDRIMRNSRKNNEEIFTRLYRYMLRPDL | WP_ | Anaerotruncus |
| | YYLAYNKLYRNKGAATKGVDDDTADGFSEEKI | 016316325.1 | sp. G3(2012) |
| | NRIIQSLADETYMPKPVRREYIPKKRSSTKKRPL | | |
| | GLPSFTDKLVQEVLRMILEAVYEPTFSDFSYGFR | | |
| | PHRDCHTALKALKKEFTGVSWFIEGDIKGCFDN | | |
| | IDHQVLVGVISSKIKDARLIKLIWKFLKAGYMEE | | |
| | WKYHTTYSGCPQGGIISPLLSNIYLNELDKFAEK | | |
| | VARAFYKPRDRVRTPEYAKIQCKKDYAQKLLK | | |
| | TATGQKKVELLKRVKSLKSELRKVPCSSKTDKV | | |
| | MKYIRYADDFIIGVKGDKSDCEHIKRQFSDFISE | | |
| | HLKMELSEEKTLITHSNQYARFLGYDVRVRRD | | |
| | GKVKPTDRCLKRTLNYTVELNVPFADKIMPFLF | | |
| | DKAIIKQTHDGKIEYIARKYLYRCTNLEIIDTYNS | | |
| | ELRGICNYYSIASNFTSLNYFAYLMEYSCLKTLA | | |
| | GKHKSTSRKIREQFRTGSGDWGIPYNTAKGQQK | | |
| | YRTFAKYMDCKDSDRENDVIVECAIRHAGTRTT | | |
| | LEKRLSAGICELCGKTNTPLAMHHVNKVKNLK | | |
| | GKQQWEIVMIAKRRKTLAVCKDCHYKIHHP | | |
| 8232 | KPTMEILERIKKNSEENKDEVFTRIYRYLLRPDI | MBS4931873.1 | Clostridiales |
| | YFVAYQNLYSNNGASTKGVDDDTADGFSEAKI | | bacterium |
| | ERIIKCLEDESYQPKPFRRVYIKKPNGKMRPLGI | | |
| | PSFTDKLVQEAVRIILEAIYEPIFMDTSHGFRPNR | | |
| | SCHTALQSVKYEFRGARWFIEGDIKGCFDNINH | | |
| | NVLVSCINKKIKDARFTKLIYKFLKAGFVDDFV | | |
| | YNNTYSGCAQGGIISPILANIYLHELDKFVENLS | | |
| | KEFNEPATEKFTADYRKAQNAMAVTRKKIKKA | | |
| | ENADDEVEKAELLKVYKSQRATLLKTPCKSQT | | |
| | DKKLKYVRYADDFIIGVNGSKVDCVRIKQQLSD | | |
| | FISNTLKMELSEEKTLITHSNTYAKFLGYNIRVR | | |
| | RSNTVKPNGRGATQRTMSNGVELAIPLKEKING | | |
| | FMFKNGIVKQCDNGELEPVCRNDMLRLTDLEIV | | |
| | SGYNAELRGICNYYYMASNFYMLNYFSYLMEY | | |
| | SCLKTLAGKHRCSIGKIKEKFSDHKGKWCIAYE | | |
| | TKKGTSYLYLSKYSDCKKGKNATDTRTSMVQI | | |
| | HKNTRSTFESRLKAKCCELCGSTTSNQYEIHHV | | |
| | NKIRNLKGKEPWEIMMLSKRRKTMVVCWECH | | |
| | KKIHNQNFEVKQ | | |
| 8233 | AEMQPTTEILTRISKNSLNNKDEVFTRLFRYLLR | ERJ86739.1 | Ruminococcus |
| | EDIWFEAYRNLYANNGASTKGVNDDTADGFSE | | callidus ATCC |
| | RKIQKITEQLKNGKFNPTPVRRTYIQKKNSDKM | | 27760 |
| | RPLGIPTFTDKLVQEAVRMILEAVYEPIFHECSH | | |
| | GFRPNRSCHTALKSLRMKFTGAKWFIEGDIKGC | | |
| | FDNINHDVLIGILNKKIKDARLIQLIQQFLKAGY | | |
| | LEDWIYHRTYSGTPQGGIISPILANIYLHELDKFV | | |
| | ENLKEEFDKPSKEKYTLEYRKAKYQTEKARKAI | | |
| | RECDPQDYERKKQLIKNLKAVRSVQLKTPCKSQ | | |
| | TDKKIQYIRYADDFILSVNGSREECIEIKKKLSQY | | |
| | ISEVLKMQLSDEKTLITHSSNHARFLGYDISVRR | | |
| | NAKIKSKNGGVSLRTLNNKVELLIPLKEKINRF | | |
| | MFDKGVIFQKKDGSLFPTHRSYMIHMSDLEIIST | | |
| | YNSELRGICNYYNLASNYCQLRYFAYLMEYSC | | |
| | LKTLAAKHNTKISKIIAKFKDGKGGWGIPYETK | | |
| | SGKKRCYFAKYSDCKDSKDGTDNISNAAVIYG | | |
| | YSRNTLEERLKAKVCELCGDTNAEYYEIHHVH | | |
| | KVKDLKGKNDWERAMIAKRRKTLVLCRNCHH | | |
| | KVHNQ | | |
| 8234 | AEMLPTTEILTRISKNSLKNPNETFTRVFRYMLR | ETA80462.1 | Youngiibacter |
| | PDIWFLAYKNLYANNGASTKGINNDTADGFSE | | fragilis 232.1 |
| | KTISNIIKSLENGEFCPTPVRRTYIAKKSSDKKRP | | |
| | LGIPTFTDKLVQEVLRMVLEAIYEPVFMDCSHG | | |
| | FRPNRSCNTALKSLRLKFTGAKWFVEGDIRGCF | | |
| | DNIDHSVLIRLLNQKIKDERLIQLIYKFLKAGYM | | |
| | EDWTYHRTYSGTPQGGIFSPVLANIYLHELDKFI | | |
| | VNLKNEFDKPSAELYTVEYRKAQWQTVKARK | | |
| | AIKNCDPNNKIQKKQFIKEMKSVRSVQLKTPCK | | |
| | SQTDKKIQYIRYADDFIIAVNGSREDCVEIKNKL | | |
| | SLFISSALKMQLSEEKTLITHSSNYARFLGYDVCI | | |
| | RRNAKVKPKKGGITVRTLNNKVELLIPIKDKLN | | |
| | KFLFNKGIVYQKKDGTLFSTHRTSLIRLSDLEIVS | | |
| | TYNSELRGICNYYSLASNYCQLRYFAYLMEYSC | | |
| | LKTLAAKHNSYISKIINKFQNGKGEWGIPYETK | | |
| | QGPKRCYFAKYSDCKSGKDYTDKITKAAIIYGF | | |
| | SRNTLEERIKAKVCELCGKTNADHYEIHHIHKV | | |
| | KDLKGKADWERAMISKRRKTMVLCRNCHHKI | | |
| | HNQ | | |
| 8235 | KPTTEILARISQNSLANKEEVFTKLYRYLLRPDI | WP_ | Streptococcus |
| | YFVAYKNLYANNGAATKGVNEDTADGFSEAKI | 069987880.1 | agalactiae |
| | DSIIKALADETYQPMPVRRTYIQKKNNRKKLRP | | |
| | LGIPTFTDKLVQEVLRMILEAVYEPIFLDVSHGF | | |
| | RPKRSCHTALKQLRREFNGTRWFVEGDIKGCFD | | |
| | NINHAVLVGLLSNKIRDARITKLIYKFLKAGYLE | | |
| | NWQYHKTYSGTPQGGIISPLLANIYLHELDKFV | | |
| | MKLKSEFDTPGVGQITPEYRELHNEIKRLSHRLT | | |
| | KVTGEEREMVLAEYKPKRQKLMTIPCTAQTDK | | |
| | KLKYVRYADDFLIAVKGNREDCQWIKSKLAEFI | | |
| | GDTLKMELSEDKTLITHSSKCARFLGYDVRVRR | | |
| | SGKIKRGGPGHVKMRTLNGGVELLVPLNDKIR | | |
| | QFVFTKGVAIQKEDGSMFPIHRKYLVGLTDLEI | | |
| | VSVYNAELRGICSYYGMASNFCKLHYFSYLME | | |
| | YSCLKTLASKHKTSLSKIIDKCNDGTGKWGVPY | | |
| | ETKLGSKRRYFANYADCKGKGSATDYISNAAV | | |
| | VYGYAVNTLENRLKAKVCELCGTTESDHYEVH | | |
| | HINKLKNLKGKERWEIAMIAKHRKTLVVCRDC | | |
| | HRSIIHKK | | |
| 8236 | QPTTEILARISKNSLANKEEIFTKLYRYLLRPDLY | WP_ | Eubacteriales |
| | FLAYNHLYANNGAATKGANNDTADGFSEVKIA | 021642534.1 | |
| | NIIKSLSDDTYQPTPVRRIYISKKSDPKKKRPLGI | | |
| | PTFTDKLIQEALRMVLEAVYEPVFLNASHGFRP | | |
| | KRSCHTALTSLKKEFNGTRWFVEGDIKGCFDTI | | |
| | DHATLVGFVNNKIKDARIIKLIYKFLKAGYLED | | |
| | WQYHKTYSGTPQGGIISPLLANIYLHELDKYVM | | |
| | KLKAEFDAPNTEKITPEYRELHNEIKMLSYYIKK | | |
| | ADGTEKERLLAEYKPKRKRLMSIPCTSQTDKKI | | |
| | KYVRYADDFIIGVKGSQEDCQWIKSKLAEFISET | | |
| | LKMELSEEKTLITHSSECARFLGYDVRVRRSGEI | | |
| | KRGGPGNAKKRTLNNHTELLVPLNDKIHKFIFS | | |
| | KGIAIQKIDGTLFPVHRNSLLRLTDLEIVTAYND | | |
| | ELRGLCNYYGMASNFHKMKYLAYLMKYSCLK | | |
| | TLASKHKSSISKVIAMFKDGKGDWGIPYETKAG | | |
| | AKRRYFVNYIDCKEAKNPTDIISNAAVIYGQSVT | | |
| | TLEKRLKARVCELCGTAESDHYEIHHVNKLKNL | | |
| | KGRKQWEIAMLAKRRKTLVVCEKCHHEIHNQ | | |
| 8237 | QPTTEILERISKNSLTHKEEVFTRLYRYLLRPDIY | WP_ | Faecalibacterium |
| | YQAYQRLYTNKGASTKGANQDTADGFSEAKIE | 087385514.1 | sp. An122 |
| | KIIQSLADETYQPTPVRRTYIAKKNNPKKKRPLG | | |
| | IPTFTDKLVQEALRMILEAIYEPLFLDCSHGFRPK | | |
| | RSCHTALEKLKYQFGGVRWFVEGDIKGCFDNIN | | |
| | HEALVGFIGNKIKDARIVKLVYKFLKAGYLEDW | | |
| | VYHKTYSGTPQGGILSPLLANIYLNELDQFVMK | | |
| | LKDEFETPEKGQITPEYRALHNKIKNLCYHIDRK | | |
| | QGVEKERMIAECKVLRKQLLKTPCTAQTDKKL | | |
| | KYIRYADDFIIGVKGSKEDCQWIKSKLAEFIGQT | | |
| | LKMELSEEKTLITHSSQCARFLGFDVRVRRCEK | | |
| | VKRNKKGAKMRTLNNHVELLVPFDDKIHDFIFS | | |
| | KKIAIQKKDGKLFPVHRNSLLRATDLEIVTVYN | | |
| | DELRGICNYYGIASNFCKLKYLSYLMEYSCLKT | | |
| | LAAKHKSKISKVVAMYKDGTGEWGIPYETKKK | | |
| | SKRRYFANYMDCKNAKNPTDQISNAAIIYGQSV | | |
| | TTLEKRLKARVCELCGTTESEHYEIHHINKLKNL | | |
| | KGKEPWEIAMLAKRRKTLVVCERCHHLIHNQ | | |
| | KPTMAILERISKNSMEQKDEVFTRLYRYLLRPDI | | |
| 8238 | YYIAYQNLYSNKGAGTKGIDDDTADGFSEKKIS | WP_ | Streptococcus |
| | TIINSLASESYTPKPVRRTYISKKSSSKLRPLGLPT | 014622875.1 | equi |
| | FTDKLIQEVLRLILEAIYEPIFLDTSHGFRPKRSC | | |
| | HTALKMIKREFGGARWFVEGDIKGCFDNIDHQ | | |
| | VLISIIQKKVKDARFIKLIYKFLKAGYMENWNY | | |
| | HKTYSGTPQGGILSPLLANIYLHELDLFVLKLKE | | |
| | QFDNPQKDNITSEYRQAHNELKRLSNRLKKVEG | | |
| | NEKQELLEEYLIKRQRLMTIPCTAQTDKKLKYV | | |
| | RYADDFIISVKGNKKDCHWLKQQLADFINGHL | | |
| | KMTLSPEKTLITHSSNCARFLGYDIRVRRSQAIK | | |
| | RGGSGQVKKRTLNGSVELLIPFKDKIHLFLFNK | | |
| | GIVIQKNDGSYFPVHRKNILTATDLEIVTIYNSEL | | |
| | RGICRYYGLTSNFNQLNYFAYLMEYSCLKTLAS | | |
| | KHKTSLVKIRAKYKDGFGSWAIPYETKTTKKR | | |
| | MYFTDYTKCKSPSTFTDLKSSVAVTYGYSRTTF | | |
| | ESRLKAKKCELCGTTDKQTTYEIHHVNKGKNL | | |
| | KGKEKWEQMMIAKQRKTLVVCHHCHRHVIHN | | |
| | H | | |
| 8239 | KPTMAILERISKNSQENIDEVFTRLYRYLLRPDIY | WP_ | Lactococcus |
| | YVAYQNLYSNKGASTKGILDDTADGFSEEKIKK | 011835237.1 | cremoris |
| | IIQSLKDGTYYPQPVRRMYIAKKNSKKMRPLGIP | | |
| | TFTDKLIQEAVRIILESIYEPVFEDVSHGFRPQRS | | |
| | CHTALKTIKREFGGARWFVEGDIKGCFDNIDHV | | |
| | TLIGLINLKIKDMKMSQLIYKFLKAGYLENWQY | | |
| | HKTYSGTPQGGILSPLLANIYLHELDKFVLQLK | | |
| | MKFDRESPERITPEYRELHNEIKRISHRLKKLEG | | |
| | EEKAKVLLEYQEKRKRLPTLPCTSQTNKVLKYV | | |
| | RYADDFIISVKGSKEDCQWIKEQLKLFIHNKLK | | |
| | MELSEEKTLITHSSQPARFLGYDIRVRRSGTIKRS | | |
| | GKVKKRTLNGSVELLIPLQDKIRQFIFDKKIAIQ | | |
| | KKDSSWFPVHRKYLIRSTDLEIITIYNSELRGICN | | |
| | YYGLASNFNQLNYFAYLMEYSCLKTIASKHKG | | |
| | TLSKTISMFKDGSGSWGIPYEIKQGKQRRYFAN | | |
| | FSECKSPYQFTDEISQAPVLYGYARNTLENRLK | | |
| | AKCCELCGTSDENTSYEIHHVNKVKNLKGKEK | | |
| | WEMAMIAKQRKTLVVCFHCHRHVIHKHK | | |
| 8240 | KPTMAILERISKNSQENIDEVFTRLYRYLLRPDIY | YP_796487 | Lactococcus |
| | YVAYQNLYSNKGASTKGILDDTADGFSEEKIKK | | lactis subsp. |
| | IIQSLKDGTYYPQPVRRMYIAKKNSKKMRPLGIP | | cremoris SK11 |
| | TFTDKLIQEAVRIILESIYEPVFEDVSHGFRPQRS | | |
| | CHTALKTIKREFGGARWFVEGDIKGCFDNIDHV | | |
| | TLIGLINLKIKDMKMSQLIYKFLKAGYLENWQY | | |
| | HKTYSGTPQGGILSPLLANIYLHELDKFVLQLK | | |
| | MKFDRESPERITPEYRELHNEIKRISHRLKKLEG | | |
| | EEKAKVLLEYQEKRKRLPTLPCTSQTNKVLKYV | | |
| | RYADDFIISVKGSKEDCQWIKEQLKLFIHNKLK | | |
| | MEFSEEKTLITHSSQPARFLGYDIRVRRSGTIKRS | | |
| | GKVKKRTLNGSVELFIPLQDKIRQFIFDKKIAIQK | | |
| | KDSSWFPVHRKYLIRSTDLEIITIYNSELRGICNY | | |
| | YGLASNFNQLNYFAYLMEYNCLKTIASKHKGT | | |
| | LSKTISMFKDGSGSWGIPYEIKQGKQRRYFANFS | | |
| | ECKSPYQFTDKISQAPVLYGYARNTLENRLKAK | | |
| | CCELCGTSDENTSYEIHHVNKVKNLKGKEKWE | | |
| | MAMIAKQRKTLVVCFHCHRHVIHKHK | | |
| 8241 | NPTSEILERVNKSSSEHHDGVFTRLFRYLLREDI | 1638786.3. | |
| | YFAAYQKLYANSGAMTPGSDNDTADGFSAEYV | peg.2502 | |
| | HELIEELRSGKYKPKPVRREYIKKQNGKMRPLG | | |
| | IPSFRDKLLQEAVRMFLEAIYEPLFYDQSHGFRP | | |
| | ERSCHTALDQIKTNFRSVKWFIEGDIKGCFDNID | | |
| | HAVLIKTLEVKIKDSRFINIIRAFLKAGYVEDFQ | | |
| | YHTTISGTPQGGIISPILANIYLHELDRKVMKLKE | | |
| | KFDKQSTRHQTPEYLHLAKRRQTLQKKIDRVK | | |
| | GEERELAIKEYKAVCNQKLKTPARMSDDKKLV | | |
| | YCRYADDFLIGISGSREDCEEIKEILREFLSTQYH | | |
| | LELSAEKTKITHSAERVRFLGYDVAVRRSQKIK | | |
| | KKANGVKQRTLNNSVELTVPLEDKIMQFLFKN | | |
| | DIIGQKPNGEIWAVCVPRLRHLSEVDIVNRYNA | | |
| | QIRGICNYYCLAANYDKLNYFRYLMEYSCLKTL | | |
| | ASKSNSTTRKIIQKYRHDGKWAIPHEVKGGIKY | | |
| | AKLVSLADCKAGKLMSDKDPWQYKSFDPKKLS | | |
| | QYVRLSAGVCELCGDNSDSCCIYHAGKMKNLK | | |
| | STTEWGKKMLHMRRKTLIVCPKCFKKIHREQN | | |
| | K | | |
| 8242 | KPTFEILERIEKCSTKYVDGVFTRIYRYLLREDIY | WP_ | Aerococcus sp. |
| | HAAYQNLYANKGATTKGIDEDTADGFSNEYVQ | 070626229.1 | HMSC072A12 |
| | ELINSLKDGSYKAKPVRREYIPKQNGKLRPLGIP | | |
| | TFRDKLLQEVVRMILEAIYEPIFHKNSHGFRPGK | | |
| | SCHTALKQIKTEFTGVVWFIEGDIKGCFDNINHN | | |
| | KLIEILGRKIKDSKFLNIIRQFLKAGYIENWQYN | | |
| | ATYSGAPQGSICAPILANIYLNELDKKFDEISTHF | | |
| | DKPSSAYKSPKYHEVDKEMKRLSYWIDNTTDE | | |
| | EERQELIKQYKEQKKSLRTLPCKNKDNKRFTFV | | |
| | RYADDWLVGVCGTKEDCKDLKEEIAKFLDEEL | | |
| | KLTLSEEKTLITHSSEKVRFLGYDISVRRNKQVK | | |
| | GHKMKNGKWRQSRTLHMKVALTIPHSDKIEKF | | |
| | MFDKGVIRQKENGEIQPIHRAGLLNLSDSEIVEH | | |
| | YNAEARGLCNYYKLAVDYHTLGYFCYLMEYS | | |
| | CLKTIANKHKTSIRKIINKYKDGKTWSVPYETK | | |
| | AGTKRVKPVKIADCKGGKVEDIIFVRKKENWK | | |
| | TTIRQRLNAKTCELCGCKNAELYEVHVVKNLK | | |
| | DLGDSNWEQAMKEKRRKTLVVCNKCHKEIHE | | |
| | H | | |
| 8243 | KPTSEILERIAKSSTEHKDGVFTRLYRYLLREDIY | WP_ | Streptococcus |
| | YAAYQKLYANRGATTKGIDDDTADGFSAHYIK | 044681649.1 | suis |
| | ELIHDLENGTYRANPVRREYIPKKNGKMRPLGI | | |
| | PSFRDKLLQEVVRMILEAIYEPVFDDHSHGFRPN | | |
| | RSCHTALRQISSDFTGVVWFIEGDITGCFDNIDH | | |
| | EILIDILARKIKDSKFLNVIRQFLKAGYVENWKY | | |
| | NKTYSGTPQGGIVSPILANIYLNELDKKFNEIKR | | |
| | RFDEPRTSRHEKTPKYREIDNEMKKISYWIDHT | | |
| | DDDEKRKELVKQFKQLKKEIHTIPCHPQTHKKF | | |
| | TFVRYADDWLVGVCGTKEECIALKAEIADFLSK | | |
| | ELKLTLSEEKTLITHSSEKVRFIGYDICVRRSQEI | | |
| | KGYKMKNGKWRKSRSLHLKVALTIPHTEKIEK | | |
| | FLFAKKAIIQTNGGALKFKPVHRTALLNLSDSEI | | |
| | VEHYNAEMRGILNYYNLAVDYHTLDYFCYLM | | |
| | EYSCLKTIANKHKTSIRKIVRLYKDGNTWSVPY | | |
| | ETKEGTKRVRPIKIADCKRGEASDIVFQRTKFN | | |
| | WKSTIRQRLNAGVCELCGKKHADLYEVHVVRN | | |
| | LNELGNSDWELAMKSKRRKTLVVCSDCHRRIH | | |
| | K | | |
| 8244 | KPTSMILERIAKSSTEHKDGVFTRLYRYLLREDI | 1950830.3.pe | |
| | YFAAYQKLYANKGATTKGIDNDTADGFSSKYV | g474 | |
| | NDLIQELKNGTYQANPVRRVYIEKKNGKLRPLG | | |
| | IPSFKDKLLQEVVRMILEAIYEPVFDKNSHGFRP | | |
| | NKSCHTAMKQISSEFTGVIWFIEGDIKGCFDNID | | |
| | HQILINIIAKKIKDSKFLNIIRQFLKAGYIENWKY | | |
| | NATHSGTPQGGICSPILANIYLNELDNKFREIQG | | |
| | KFNKARTIEEIKTLEYRTIDNEMKRVSYWINHTE | | |
| | NEQERNNLIKKYKALQQEIHKVPCHTKNNKKFT | | |
| | FVRYADDWLAGVCGTKEECVMLKAEIAKFLTE | | |
| | ELKLTLSEEKTLITHSSQKVRFLGYNINVRRSKE | | |
| | VKGFKMKNGKYRKSRTLHYKVALTIPHKEKIE | | |
| | KFLFSKGVIMQKANGEIKPIHRTVLLNLSDKEIL | | |
| | EQYNAEMRGILNYYRLAVDYHTLNYFCYLMEY | | |
| | SCLKTIANKHKSSIRKIIREYKDKNTWSIPYETKT | | |
| | GIKRIRPVKIADCKKGVVNDVIYKRTNFSFKSTI | | |
| | RQRLNARTCELCGQTGNELYEVHTIKNLNELGN | | |
| | LNWEKAMKKMKRKTIIVCKECHNIIHS | | |
| 8245 | KTTCEILERIQKNSTEHKDGVYTRLYRYLLREDI | WP_ | [Clostridium] |
| | YYVAYQRLYSNKGATNKGATTKGVDNDTADG | 021420371.1 | innocuum |
| | FGQVYVQELITQLRNGTYKPKPSRRVYIEKSNG | | |
| | KMRPLSIPSFRDKLLQEVVRMFLEAIYEPIFSDYS | | |
| | HGFRPNRSCHSALKQAKIYFTGAKWFIEGDIKG | | |
| | CFDNINHKVLINILERKIKDSKFINIIRLFLTAGYV | | |
| | DDFKYNATYSGCAQGGIISPILANIYLNELDKKI | | |
| | LEIKNKFDKPHQAKYTKEYSHIKSKRDYQKSKL | | |
| | KNCDEEQRKEILRTIDDLNKKLRKTPRTPNDDK | | |
| | NIYFIRYADDFLIAVKGNKNDCEIIKKEIHDFLRD | | |
| | ELKLTLSEEKTLITHSSNKALFLGYNISIRRSQTV | | |
| | KSVSQNGRKYKQRTLNNSVALTVPFERIEKFMF | | |
| | KRRMIKQIKPKTFRPLHRKGWLYLPDYVIVERY | | |
| | DAELRGILNYYNLAVDYNYLGYFRYLMEYSCL | | |
| | ATIAGKHNSSTSKIVSQYRHGKYWGVPYLINK | | |
| | GEEKIKRLARLKDCKSNACNDTIVKHRYVKAT | | |
| | NASIRDRLQTGVCELCGKRIDVPLEVHIVSKLKD | | |
| | LKDDKPWKVVMKSKRRKTLVVCPECHKHIHVE | | |
| 8246 | TKPTSDILERIYKNSSEHKDGVYTRLYRYLLRD | WP_ | Ruminiclostridium |
| | DIYYLAYQKLYSNKGASTKGIDNDTADGFGKK | 024832200.1 | josui |
| | YVDSLIKELSDGTYTPKPVRREYIKKKNGKMRP | | |
| | LGIPSFRDKLLQEVIRNFLEAIYEPTFSDFSHGFR | | |
| | PKRSCHTALEQAKLYFRGAKWFIEGDIKGCFDD | | |
| | IDHDKLIEILQRKIKDSRFINVIRSFLKAGYMED | | |
| | WKYHQTYSGCPQGGILSPILANIYLNELDNEIAK | | |
| | IKQAFDKPATRKITPEHSSLSAKLFKRRKKLKSA | | |
| | TGEQRTALLSEIHDLEEQYRKTPSKMQDDKKVS | | |
| | YVRYADDFLIAENGSKEDCVRLKEQLAKFLFDE | | |
| | YKLTLSKDKTLITHSSERVRFLGYDISVRRNQEY | | |
| | MTDSRGRKARHLNNTVALSVPFEKIEKHMFEK | | |
| | GFVRQTEAKKFRPLHKKGWLYLPDAEIVERYN | | |
| | AEIRGIVNYYYLASNLYKLQYFAYLMEYSCLAT | | |
| | LAGKHNSTIKKIVAKHKQGKDWAIKYKTENGA | | |
| | TKEKRIVKLKDCKGKCEDKIVQHRYSVNTNATI | | |
| | RARLQAGICELCGSKDKASYEVHHVPSVKGLD | | |
| | GTSLWEQIMKSKRRKTLVVCEDCHKAIHDD | | |
| 8247 | KPTAEILERINKNSNEHKDGVYTRLYRYLLREDI | WP_ | Petroclostridium |
| | YYSAYQKLYSNKGASTEGIDNDTADGFGKKYV | 094550212.1 | xylanilyticum |
| | ESSIEELSNNTYKPKPVRREYIKKSNGKMRPLGI | | |
| | PSFRDKLLQEVMRRFLEAIYEPIFSDFSHGFRPN | | |
| | RSCHTALKQTLPYFKGARWFIEGDIKGCFDNID | | |
| | HDKLIEILQRKIKDSKFINIIRSFLKAGYIEDFRYN | | |
| | QTYSGTPQGGILSPILANIYLNELDNKIMEIKQNF | | |
| | DKPATRCVNPTYDEIRGKRYWLQQKLKNATDE | | |
| | EKPVLISRINEYSKKLLKLPYKSQTDKNIAFVRY | | |
| | ADDFLIAVRGNKEDCIKIKEQLREFLNDELKLTL | | |
| | SDEKTLITHSSEKVRFLGYDISVRRNQQISTNSL | | |
| | GHKKRQLNGTVELLVPLEKIEKFMFDKGIIRQS | | |
| | KAKKFHPIHRKGWLYLPDQEILERYNAEIRGILN | | |
| | YYHLANNYNKLNYFQYLMEYSCLATLAGKHN | | |
| | SSISKVIDKYKSGKGWAIKYKTEKGKTREKRIV | | |
| | KLQDCKGFCDDNIVRHIYSVNTNATIRARLQAG | | |
| | VCELCGSRGKSNYEVHHVSSVKGLEGNKLWEQ | | |
| | IMKIKNRKTLVVCEDCHKAIHS | | |
| 8248 | LERALQQMRERADWRYLQSETQYVPWRAPGV | 19533 | |
| | DNMTLAYAADHLDEIITQRLERLSCLPYGPLPA | | |
| | KRYYIEEGSKQRPIAIMTVPDGIVSRALLELVRE | | |
| | PLEEPLPPCNFAYLQGIGPQRRVDHITSMVEQYG | | |
| | WVVQLDIRSYFDSIPHDLLYERIDRLIVDPDLLA | | |
| | LLWEFVTQPIRENGCDHATTVGVPQGGVISPVL | | |
| | ANLYLSPLDEAMLAEGWGYARYADDFVIFTST | | |
| | KAEARRARDYATEIIAELGLQVHRTGRKQAIIA | | |
| | KDCDGFEFCGHFYKWYGDRVYVAPRRSKIEEV | | |
| | V | | |
| 8249 | ETSVRHLGELTYPLRASAAFQRQALTGEPDLLT | WP_ | Buchananella |
| | EIAAPDSLLNAWRYVFTRDAKDGYLLQQSQQIA | 073825178.1 | hordeovulneris |
| | ADPDRFVAALSGALLSGRYQPEPQVEVLIPKKG | | |
| | KTSAMRELSIPSIRDRVVERAVLNAIIDRADLLQ | | |
| | CSASFAFRRGLGVQAATHEITQLRDSGNRYVLL | | |
| | TDIANYFGRINIADSLRVLQRGLFCSRTLALLRFI | | |
| | AKPRRVVGRRRIRSRGLAQGSCLSPLLANLALT | | |
| | DIDFALADTGVGYVRFADDILLCAPSRTELAAS | | |
| | QRLLASLAAHQGLQLNEEKTMHTSFDAGFCYL | | |
| | GVDFTAHQPVTDLHYGVKHTKQPAKV | | |
| 8250 | WFADEPRHTRGGSRMADLYRQVRLMKTLSSA | RCG92311.1 | Pseudomonas |
| | WRVVRASCMQSSSSEIRNEAIEFEADSFRQLKSI | | aeruginosa |
| | QSKLQKKKFEFLPQHGIAKKRPGKSSRPLVIAPI | | |
| | PNRIVQRAILDVLQDNVAYVQEILKVETSFGGIK | | |
| | GKNVALAIAAINKAFSNGVTHYVRSDIPSFFTKV | | |
| | QRAKVVDALAKNIDDVDMVNLFSAAIETTLGN | | |
| | LTDLQRRGLESIFPLSHDGVAQGSPLSPLIANIYL | | |
| | AEFDREMNREGLACIRYIDDFVIMAASEKQVM | | |
| | KGFRAAKAVLRRQGLQVYSPDDDPLKASKGDV | | |
| | RDGFDFLGCYVKPGLVQPSKFARNRLLEKID | | |
| 8251 | ATYDNFLLAWQRTVNTTSRMIRDELGMKIFAH | WP_096673502 | ischerella sp. |
| | NLQTNLEYLVQQVKAKDFPYKPLADHKVYVPK | | NIES-4106 |
| | PSTTLRTMSLMAVSDVIIYQALVNIIADKAYSYL | | |
| | VTHENQCVLGNIYSGPGKRWMLRPWKKQYTR | | |
| | FVDCIENLYHAGNPWIASTDIVAFYDTIDHARLL | | |
| | SLIRKYCGDDQQFQELLQECLAKWAVHNSNIT | | |
| | MGRGIPQGSNASDFLANLFLYEIDKEMIVNGYH | | |
| | YIRYVDDVRILASDKSTVQRGLILFDLELKRAGL | | |
| | VAQVTKTSVHEIEDIETEISRLRFIITAPTRNGNC | | |
| | LLVTLPSLPKSEQA | | |
| 8252 | DAEYLKSVWKSDIRPLLRQAKFSNSRYAIDPLH | WP_079554060 | Arthrobacter sp. |
| | YAAYEWNLDAFVDGIVRDLKLHQFTPERGEVIR | | 49Tsu3.1M3 |
| | AAKGTGLTRPVCELSPRDALVYTAIVKRVEDQL | | |
| | LVSSRKWVGHTRSDKGSSVETGDGAVDSFDWF | | |
| | QFWLRRQGLIADILEIDGVKFIVESDISNFFPSIRL | | |
| | EHVREHLLAHTRLSKELVRLCMQMIDGVLPRS | | |
| | NYLDYSHLGLPQGNNDSSRAIAHSFLAPIDQEFD | | |
| | VEGLAGRYTRYMDDVLYGVRHVAEGEKIISRL | | |
| | QRSLESLALTPNSAKTKIVPVDEYLRDSMVESN | | |
| | AEIERIQSLLESSGALGGSTEPEAKL | | |
| 8253 | AVWENIVEAERISTNRKMRNPGVIRHIGNRWRN | WP_ | Prevotella sp. |
| | LIEIQQFVLNGTMRTDEYQHEQRVSGQDKLRDI | 091853483.1 | BP1-145 |
| | AKLHFHPSHIQHQLITMAGNRRIDRSLIRHTYAS | | |
| | RKGYGQILCATEMKKSLSKYRRTERWYGQGDV | | |
| | CKYYDNIPHSLIREDLERLFKDKKFVDTFMEPFE | | |
| | RFAPEGKGIPLGIRPSQSIGNLTLKDFDHFMTEE | | |
| | NKCADYKRYLDDFMFTGATKGEVKRKMKRAI | | |
| | KYLHDLGFNTHEPKIHRISEGMDMLGFVYYGV | | |
| | KNDMWWRKSDKKRWLRHR | | |
| 8254 | AYDYYLHRKEKRDQKSGKSSNVITLKQIADHE | WP_ | Gimesia maris |
| | YLLYCFQELRRYGGLGAGKDDISYFDISTSDCA | 002646604.1 | |
| | KVFRKLSESLLRGRYRPQFPRKVPIPKPGTDEKR | | |
| | TLKINSIFDRSVSMALDKTLAPQLEKLFLEGSYG | | |
| | NRTNRSPWKMLAQLKKTVEETGRWVLAIEDIR | | |
| | KAFDNVKVKDIVKTHQQAQLELKEKHGIKINDS | | |
| | VVNLISTIAKGVTQKRKKGIDQGSNYSPQSLNV | | |
| | LLHYIHDVPLNAEVAFPLWYRYVDNLTYLCKS | | |
| | VSEGQRVLIKVRQVLNSASLKLKGEDGIVDLRK | | |
| | TTSSLLGFKLRRSNNQLIYLIAPRSWENLK | | |
| 8255 | SYFYKERRGKIYESYYGSIVTYNTTTSKMADSK | WP_ | Thermoanaerobacterium |
| | ELFSSFFKARMSLKKEFPYDEIAIKLFEYNLEDNI | 014757544.1 | |
| | NRFSKEILKGYKFNTDFIGYKVPKNEKDDRQKV | | |
| | MDNIFNTIAGASFLDIIGIVIDREFSSNCCGNRLN | | |
| | KKLNTEYSYEYFWYGWYYKFMKKAFNKVLNK | | |
| | NNYYLKLDIKSFYTNINQNILYDKIIKLIPYKDSR | | |
| | LKEFINSLIKRHIPYVNNGKGLPQGSLTSGFLAN | | |
| | LYLDDFDKYFISKTNDGYMRYVDDIFIFGKTEE | | |
| | QIKELGKEAENKLKDLYLEINKEKTSMGDKSSL | | |
| | KNIYYDDKELDDFQKRL | | |
| 8256 | ARLEAEGQHRQAKRLNRMYCKSFDTKLVAAT | WP_ | Methylobacterium |
| | DANKRLPAGQRAKRAELHEIAAGMDLRQTQGT | 170855116.1 | sp. |
| | ATFRAEPKKKGYRPVVNFDLRGRTAQLVLKRA | | 275MFSha3.1] |
| | AKPFIKIRPDQYASDGGQPAACHRIIELAAQGYA | | |
| | WFEEIDVRSFYASIIPEGVTELLGDLPKEMTEAN | | |
| | TLAKRVRASFMKTARDIPSDDLCKLRNEVRAGI | | |
| | PQGSALSPLVAEAVMSNVLDQATQGADWPDV | | |
| | QLVVFADNIAVLGRTKADVEDAAENLAGAFSR | | |
| | SQLGPFNLHRKPARSINQGFDFLSTRFIARNRRIR | | |
| | AEVAPAARLKRIH | | |
| 8257 | PKGFSFKDTFTPIQRKESLIGLLGIKDIEKFESLLR | WP_ | [Photorhabdus] |
| | DGVENAYYIKPPIKKKNGGERIVYAPNRMLKSI | 011148932.1 | |
| | LRKINNRIFNQINFPDYLYGSIPDKENPRDYILCA | | |
| | HQHCKAKILIKLDIENFFPTMKTKFVFNIFKDLF | | |
| | KFSDEVSNILTKLTTYDGFVPQGAPTSTYLANL | | |
| | YFYDCEPNKVNYLRSLGFRYTRLIDDITVSRLK | | |
| | KEGDWKFVETIISEFITQKELSVNKDKTQLLSAN | | |
| | SPQSFKVHGLCIEETTPRFTKNERINIKTQVKRV | | |
| | VKTGYNRDNIRMQKNYHDVYFSVKGKITKLKR | | |
| | VNCPDYPLLKKLLAKHCDPLPEHKEIKRINRVIS | | |
| | NLSKDHATFGSTERYRSRYFQVIFRLEILKKLYP | | |
| | VEANEFKARLKLISPIKNEN | | |
| 8258 | IYKGSKIDSLDKLSEVLSIDIDELTNVLLLEDEAK | WP_ | Acinetobacter |
| | YKAGFIKKSNGKLRNIYNPNTSLRKIQRRIKNRI | 005070670.1 | |
| | FTQQIEWPDYIFGSIPADEISSNDYVASAEKHCG | | |
| | ARALLKLDIEDFFDNITQELVEKIFKNFFKYNDE | | |
| | LSKILAQLCCVDGKVPQGGITSSYIASLALFSIEE | | |
| | RLFFRLKNKKLIYTRYIDDITISSKNSEYNFDSIIK | | |
| | IVEGQLNSIDLPLNIDKIKVERFSSKALKVHNIRV | | |
| | DLKTPKFDKIEVKNIRAAIH | | |
| 8259 | TQLNVDELASFVGTNAQTIQTITNKTTSYYKSFE | WP_ | Oenococcus oeni |
| | LKKRSGGSRTILAPKQQLLSIQKKIATTLEKIYPV | 032821736.1 | |
| | SIYSHGFIYKKGIKTNAEEHLRSTELLNFDIDNFF | | |
| | DNIPEYRIFGIFRYYFNMNNYISGILKELTCVERH | | |
| | LPQGAPSSPILSNIICYKIDKDLGKLARRNHCKY | | |
| | TRYVDDITFSSKRKLPSSIYNRINKSCSNNIVKIL | | |
| | SDSGFTINHRKTRLLTKSQRQEVTGITTNKQLNV | | |
| | SKTYIRSTRAMLY | | |
| 8260 | RWDESKKRRAENKKKREAENKQRREAWDIYR | OGQ87915.1 | Deltaproteobacteria |
| | KKTVVHAGEGVSSGLQDVLSDTDALVARGLPV | | bacterium |
| | MHCAADVAVMLGLPLPTLRWLTFHRRATALV | | |
| | HYHRFDIPKKTGGRRLISAPKATLKKAQQVVLD | | |
| | NILSRLPTEPEAHGFVAQHSIVTNAACHAGKAV | | |
| | VINVDLKDFFPSIGFRRVRGLFQRLGYSGQVAT | | |
| | MLGLLCTEPPRIKAELDGKVFHVALGERVLPQG | | |
| | ACTSPAITNTICRRLDRRLVGLASKHGFTYSRYA | | |
| | DDLTFSGNVPKKAGRLLRSVRAILENEGFAENG | | |
| | KKTRVMRQSRRQEVTGLTVNDKPRVSREQRRE | | |
| | LRAILH | | |
| 8261 | LVETFGSINNIKNALLDYFEYYECEKNKELVIMS | WP_ | Hungatella |
| | ILIRKELCTLDLASPFEYSIIDVIGSMSYFIEKLKT | 055655910.1 | hathewayi |
| | RVAFHQNYERLRYAPIKRWRARKRFSAYELFG | | |
| | MDIMEMRQMQSLFGYNKKKSVISKNLLINGKK | | |
| | RKIKMYSCTSEGFALRSFHLKLMKQLQKLIELQ | | |
| | PYSYAYRKDRSIFMCMNQHIDSKFFLKIDIKDFF | | |
| | NSISKGKMNKILKCHFCYDSKQAYEDNVIRRRS | | |
| | RYLGEYVKEWLGIKEITDICFVNGRLALGMVTS | | |
| | PILSNIYMDFFDERFHDNYPGLIYTRYSDDILISS | | |
| | GKWFDYKSILNFIAKELCYLELEINEHKVGFYK | | |
| | LKQAGDHIKFLGLNIVQGPEENYITVGKQYIKD | | |
| | VCSNIS | | |
| 8262 | YRSYDIKNIEEVKVRLLQAENYTKSIESSLKFNI | ABS14021.1 | Brucella anthropi |
| | AHTKGRALYFPQDYETEIIIRKANTNIKKILGINP | | ATCC 49188 |
| | VSRNDIIRHLKEILREGVPYVIGRYDIKRFYDNIK | | |
| | ISALNQNLDESLSTTYDTRRLVSGFLSSHEALYS | | |
| | SGLPTGISLSATLSELYLRNFDRGIKALPWVRYF | | |
| | ARYVDDIIIIAEPRTTAQLMESALISGLPDGLALN | | |
| | SGKDKRYFRKLERDFGGAGPEADFDYLGYRFK | | |
| | VDKILKKSSDCGTLASRKVTVDISEKKVKIRKTR | | |
| | FIYAVHKYLAD | | |
| 8263 | KGKKEKKKGAFFSSIEEVKKLKFDFVVSRISAHT | EMJ85443 | Leptospira |
| | KSDLLVEPTGYYDLEWFVKNRRSDLFNVIHSFY | | meyeri serovar |
| | SPSKKITLNMPKGNFSYRPVSYLLPMDSLIYLAV | | Semaranga str. |
| | TEKLIFYTKDKFSKFVYSNLLNPFDKKEVFSEPV | | Veldrot |
| | KHWLRMRNTIRSNYKTNSLDKYYSADISGYFE | | Semarang 173 |
| | NIKIKYLLKKAKFYIGKHEVSYTKYLKKLLEKW | | |
| | QYADSQGLIQPHPASSILGKIYLSPVDSYFSYLG | | |
| | KRYSRYVDEFHIQTDDLSEMLNITIHLNEQLREL | | |
| | GLNLNSKKTIFKIGKDIWDEINENQDFFSAVDYA | | |
| | QRIRKKDELA | | |
| 8264 | SGTPESKQSQPGGRKPPLMCHPAITYDAMCSLA | AF0732 | Turneriella parva |
| | GLQRAQISLIEELKRRGEGSKHALSYEDLTELGA | | DSM 21527 |
| | LLRSHQYSHRPCRLMTIKVGSKKRDIDSPDWLD | | |
| | RIVQRTYVDTIYPLVQQMACDSSHAYLYKRSIH | | |
| | TALWRLIMNIEHFGYSHVERTDIESFFDSIPHAE | | |
| | MERVIDLHIRDIELNAFSHELLRVAEGFKNSKVG | | |
| | LPTGWLIPPLWANMLLTPVDARLESAGLKFFRY | | |
| | GDDYGILQRSKQEAEFAQGLLESALKPLGLHLK | | |
| | PGYSHKTYTRKLEDGLIVLGHEIRRINNRLTVAI | | |
| | SKNSLAETR | | |
| 8265 | CIGDIESAAWRAFRGHSRKPEVRAFQESMSSNC | CCX61742.1 | Bacteroides sp. |
| | AFLYDSLRDGSWQNLMVYRQLTKTNNNGKVR | | CAG: 598 |
| | QIDSPSLVVRIYQHLLLNLLEPHYFRKDNLNGLN | | |
| | CKPGCGITSAIPSRSVIHRLKHIFYDRRDLHYCLT | | |
| | IDQRQCYDHITPKVFRKALKQMVDDKWLVDFA | | |
| | VDVCFVDGRLPIGTPTSPFVHHVVMLEFDYFVK | | |
| | SLSSASVRYADDNFLAFATKEEAQAAKWRIKN | | |
| | WWWFRLGMRAKRGSAVVRPLSEPCDFCGYVF | | |
| | HRVDGMGICDHNKGYVK | | |
| 8266 | RAARNNSAPGPNGVPYLVYKRCPKLLARLWKI | BAC82599.1 | Tetraodon |
| | LRVIWRRGKVAHQWRWAEGVWVPKEEKSTLI | | nigroviridis |
| | EQFRTISLLNVEGKIFFSILSHRLSDFLLKNQYIDS | | |
| | SVQKGGIPGVPGCLEHCGVVTQLIREAREGRGS | | |
| | LAVLWLDLANAYGAIPHKLVEMALARHHVPCS | | |
| | IKTLIMDYYDSFHLRFVTSGSVTSEWHRLEKGII | | |
| | TGCTISVIIFALAMNMLAKSAEPECRGPITKSGIR | | |
| | QPPIRAFMDDLTVTTTSVPGCRWILQGLERLMT | | |
| | WARMRFKPGKSRSLVLKAGKVTDRFRFYLGGT | | |
| | QIPSVSEKPVKSLGKMFDGSLKYAFS | | |
| 8267 | QVDWDEINEMLYERQWQKLGRGASTKTRIAQD | WP_0603863 | Bacteroides |
| | KTIIDLREMSVNGTRLNLDTALKNLRRDMIDDW | 31.1 | stercoris |
| | FFDPLQYVDLCNQDFVLDYFSSQDVREHYKFQE | | |
| | MEVLYIPKESLVQRKAMVGNFVDRLLYIAIVEK | | |
| | LAPLMEEYISSRVYAARLNRSEDNSLIANGVNQ | | |
| | WIKMNYLIDEWLEKGVGCLFKCDVVNYFDNIS | | |
| | HATLIGFLREIATDADALNAIKMLEQMFSEISDS | | |
| | QTNCGLPQNSDASSLLATFYLSHVDIQIQAQAIE | | |
| | YCRFMDDIYFMAPDYFSARNVLQSLEGELRRLN | | |
| | LCLNSSKVVCITLENKKEVDEFREGLSLYNHTN | | |
| | QKIKQLIR | | |
| 8268 | IAFIHPKNNEKANAHWEYYRDFLHDTDRFAESI | KJR43562 | Candidatus |
| | ATIPLDEFKLLYEKAYWHQKIEFPAIDYIWRTIQ | | Magnetoovum |
| | GASNDKIEYLEYSLNYAFQSWYSGKFIDKGLEY | | chiemensis |
| | SIPKQNPKKERRKVLLSPIDSIVEMKIIADIGPEIE | | |
| | NIIDAKFRQGGPVSLGNRLDLKENSLVKKRNLF | | |
| | KYWPKQFRLRYFTILQQIQDKTDGYIVNIDVSDF | | |
| | YPSIPHQEMMKIIEKYLPKLSNFQKHWINDFLKT | | |
| | GEMSKDDGKGIPQGPPLSHVLANLYLYDKLDS | | |
| | KIIHGFLPKFYTRYVDDIVYVASSKKDAETFYK | | |
| | WIDHVINPLVKNKDKSYIVSNSEYLNTYKQHEII | | |
| | ELIRIKVEQVIQKVYLIAKIL | | |
| 8269 | KEPDVSLGSTWLSDFPQAWAETGGMGLAVRQ | PE2d497 | |
| | APLIIPLKATSTPVSIKQYPMSQEARLGIKPHIQR | | |
| | LLDQGILVPCQSPWNTPLLPVKKPGTNDYRPVQ | | |
| | DLREVNKRVEDIHPTVPNPYNLLSGLPPSHQWY | | |
| | TVLDLKDAFFCLRLHPTSQPLFAFEWRDPEMGI | | |
| | SGQLTWTRLPQGFKNSPTLFNEALHRDLADFRI | | |
| | QHPDLILLQYVDDLLLAATSELDCQQGTRALLQ | | |
| | TLGNLGYRASAKKAQICQKQVKYLGYLLKEGQ | | |
| | RWLTEARKETVM | | |
| 8270 | TLNIEDEYRLHETSKEPDVSLGSTWLSDFPQAW | Q9YK99 | Murine leukemia |
| | AETGGMGLAVRQAPLIIPLKATSSPVSIKQYPMS | | virus |
| | QEARLGIKPHIQRLLDQGILVPCQSPWNTPLLPV | | |
| | KKPGTNDYRPVQDLREVNKRVEDIHPTVPNPY | | |
| | NLLSGLPPSHQWYTVLDLKDAFFCLRLHPTSQP | | |
| | LFAFEWRDPEMGISGQLTWTRLPQGFKNSPTLF | | |
| | DEALHRDLADFRIQHPDLILLQYVDDLLLAATS | | |
| | ENDCQQGTRALLQILGDLGYRASAKKAQICQK | | |
| | QVKYLGYLLKEGQRWLTEARKETVMGQPIPKT | | |
| | PRQLREFLGTAGFCRLWIPGFAEMAAPLYPLTK | | |
| | TGTLFNWGPDQQKAYQEIKQALLTAPALGLPD | | |
| | LTKPFELFVDEKQGYAKGVLTQRLGPWRRPVA | | |
| | YLSKKLDPVAAGWPPCLRMVAAIAVLTKDAGK | | |
| | LTMGQPLVVLAPHAVEALVKQPPDRWLSNAR | | |
| | MTHYQALLLDTDRVQFGPVVALNPATLLPLPEE | | |
| | GLRHDCLDILAEAHGTRPDLTDQPLPDADHTW | | |
| | YTDGSSFLQEGQRKAGAAVTTETEVIWAKALPS | | |
| | GTSAQRAELIALTQALKMAEGKKLNVYTDSRY | | |
| | AFATAHIHGEIYRRRGLLTSEGKEIKNKGEILAL | | |
| | LKALFLPKRLSIIHCPGHQKGNSAEARGNRMAD | | |
| | QAAREIASKETPETSTLLIENSTP | | |
| 8271 | TLNIEDEYRLHETSKEPDASLESTWLSDFPQAW | Q60FS9 | Murine leukemia |
| | AETGGMGLAVRQAPLIIPLKATSTPVSIKQYPMS | | virus |
| | QEARLGIKPHIQRLLDQGILVPCQSPWNTPLLPV | | |
| | KKPGTNDYRPVQDLREVNKRVEDIHPTVPNPY | | |
| | NLLSGLPPSHQWYTVLDLKDAFFCLRLHPTSQP | | |
| | LFAFEWRDPEMGISGQLTWTRLPQGFKNSPTLF | | |
| | DEALHRDLAGFRIQHPDLILLQYVDDLLLAATS | | |
| | ENDCQQGTRALLQILGDLGYRASAKKAQICQK | | |
| | QVKYLGYLLKEGQRWLTEARKETVMGQPIPKT | | |
| | PRQLREFLGTAGFCRLWIPGFAEMAAPLYPLTK | | |
| | TGTLFNWGPDQQKAYQEIKQALLTAPALGLPD | | |
| | LTKPFELFVDEKQGYAKGVLTQRLGPWRRPVA | | |
| | YLSKKLDPVAAGWPPCLRMVAAIAVLTKDAGK | | |
| | LTLGQPLVVLAPHAVEALVKQPPDRWLSNARM | | |
| | THYQALLLDTDRVQFGPVVALNPATLLPLPEEG | | |
| | LRHDCLDILAEAHGTRPDLTDQPLPDADHTWY | | |
| | TDGSSFLQKGQRKAGAAVTTETEVIWAKALPS | | |
| | GTSAQRAELIALTQALKMAEGKKLNVYTDSRY | | |
| | AFATAHIHGEIYRRRGLLTSEGKEIKNKGEILAL | | |
| | LKALFLPKRLSIIHCPGHQKGNSAEARGNRMAD | | |
| | QAAREIASKETPETSTLLIENSTP | | |
| 8272 | TLNIEDEYRLHETSKEPDVSLGSTWLSDFPQAW | P08361 | Cas-Br-E murine |
| | AETGGMGLAVRQAPLIIPLKATSTPVSIKQYPMS | | leukemia virus |
| | QEARLGIKPHIQRLLDQGILVPCQSPWNTPLLPV | | |
| | KKPGTNDYRPVQDLREVNKRVEDIHPTVPNPY | | |
| | NLLSGLPPSHQWYTVLDLKDAFFCLRLHPTSQP | | |
| | LFAFEWRDPEMGISGQLTWTRLPQGFKNSPTLF | | |
| | DEALHRDLAGFRIQHPDLILLQYVDDLLLAATS | | |
| | ELDCQQGTRALLQTLGDLGYRASAKKAQICQK | | |
| | QVKYLGYLLKEGQRWLTEARKETVMGQPIPKT | | |
| | PRQLREFLGTAGFCRLWIPGFAEMAAPLYPLTK | | |
| | TGTLFNWGPDQQKAFQEIKQALLTAPALGLPDL | | |
| | TKPFELFVDEKQGYAKGVLTQKLGPWRRPVAY | | |
| | LSKKLDPVAAGWPPCLRMVAAIAVLTKDAGKL | | |
| | TMGQPLVILAPHAVEALVKQPPDRWLSNARMT | | |
| | HYQALLLDTDRVQFGPVVALNPATLLPLPEEGL | | |
| | QHDCLDILAEAHGTRSDLMDQPLPDADHTWYT | | |
| | DGSSFLQEGQRKAGAAVTTETEVIWARALPAG | | |
| | TSAQRAELIALTQALKMAEGKKLNVYTDSRYA | | |
| | FATAHIHGEIYRRRGLLTSEGKEIKNKDEILALL | | |
| | KALFLPKRLSIIHCPGHQKGNSAEARGNRMADQ | | |
| | AAREVATRETPETSTLLIENSTP | | |
| 8273 | TLNIEDEYRLHETSKEPDVSLGSTWLSDFPQAW | O41250 | Rauscher murine |
| | AETGGMGLAVRQAPLIIPLKATSTPVSIKQYPIS | | leukemia virus |
| | QEARLGIKPHIQRLLDQGILVPCQSPWNTPLLPV | | |
| | KKPGTHDYRPVQDLREVNKRVEDIHPTVPNPY | | |
| | NLLSGLPPSHQWYTVLDLKDAFFCLRLHPTSQS | | |
| | LFAFEWRDPEMGISGQLTWTRLPQGFKNSPTLF | | |
| | DEALHRDLADFRIQHPDLILLQYVDDLLLAATS | | |
| | ELDCQQGTRALLQTLGDLGYRASAKKAQICQK | | |
| | QVKYLGYLLKEGQRWLTEARKETVMGQPTPKT | | |
| | PRQLREFLGTAGFCRLWIPGFAEMAAPLYPLTK | | |
| | TGTLFNWGPDQQKAYQEIKQALLTAPALGLPD | | |
| | LTKPFELFVDEKQGYAKGVLTQKLGPWRRPVA | | |
| | YLSKKLDPVAAGWPPCLRMVAAIAVLTKDAGK | | |
| | LTMGQPLVILAPHAVEALVKQPPDRWLSNARM | | |
| | THYQALLLDTDRVQFGPIVTLNPATLLPLPEEGL | | |
| | QHDCLDILAEAHGTRPDLTDQPLPDADHTWYT | | |
| | DGSSFLQEGQRKAGAAVTTETEVIWAKALPAG | | |
| | TSAQRAELIALTQALKMAEGKKLNVYTDSRYA | | |
| | FATAHIHGEIYRRRGLLTSEGKEIKNKDEILALL | | |
| | KALFLPKRLSIIHCPGHQKGNRAEARGNRMADQ | | |
| | AAREVATRETPETSTLLIENSTP | | |
| 8274 | TLNIEDEYRLHETSKGPDVPLGSTWLSDFPQAW | P26808 | Friend murine |
| | AETGGMGLAVRQAPLIIPLRAASTPVSIKQYPMS | | leukemia virus |
| | REARLGIKPHIQRLLDQGILVPCQSPWNTPLLPV | | (ISOLATE |
| | KKPGTNDYRPVQDLREVNKRVEDIHPTVPNPY | | PVC-211) |
| | NLLSGLPPSHQWYTVLDLKDAFFCLRLHPTSQS | | |
| | LFAFEWRDPEMGISGQLTWTRLPQGFKNSPTLF | | |
| | DEALHRDLADFRIQHPDLILLQYVDDLLLAATS | | |
| | ELDCQQGTRALLQTLGDLGYRASAKKAQICQK | | |
| | QVKYLGYLLKEGQRWLTEARKETVMGQPTPKT | | |
| | PRQLREFLGTAGFCRLWIPGFAEMAAPLYPLTK | | |
| | TGTLFKWGPDQQKAYQEIKQALLTAPALGLPD | | |
| | LTKPFELFVDEKQGYAKGVLTQKLGPWRRPVA | | |
| | YLSKKLDPVAAGWPPCLRMVAAIAVLTKDAGK | | |
| | LTMGQPLVILAPHAVEALVKQPPDRWLSNARM | | |
| | THYQALLLDTDRVQFGPIVTLNPATLLPLPEEGL | | |
| | QHDCLDILAEAHGTRPDLTDQPLPDADHTWYT | | |
| | DGSSFLQEGQRKAGAAVTTETEVIWAKALPAG | | |
| | TSAQRAELIALTQALKMAEGKKLNVYTDSRYA | | |
| | FATAHIHGEIYRRRGLLTSEGKEIKNKEEILALL | | |
| | KALFLPKRLSIIHCPGHQKGNRAEARGNRMADQ | | |
| | AAREVATRETPETSTLLIENSAP | | |
| 8275 | TLNIEDEYRLHETSKGPDVPLGSTWLSDFPQAW | P26809 | Friend murine |
| | AETGGMGLAVRQAPLIIPLKATSTPVSIKQYPMS | | leukemia virus |
| | QEARLGIKPHIQRLLDQGILVPCQSPWNTPLLPV | | (ISOLATE |
| | KKPGTNDYRPVQDLREVNKRVEDIHPTVPNPY | | FB29) |
| | NLLSGLPPSHQWYTVLDLKDAFFCLRLHPTSQS | | |
| | LFAFEWRDPEMGISGQLTWTRLPQGFKNSPTLF | | |
| | DEALHRDLADFRIQHPDLILLQYVDDLLLAATS | | |
| | ELDCQQGTRALLQTLGDLGYRASAKKAQICQK | | |
| | QVKYLGYLLKEGQRWLTEARKETVMGQPTPKT | | |
| | PRQLREFLGTAGFCRLWIPGFAEMAAPLYPLTK | | |
| | TGTLFEWGPDQQKAYQEIKQALLTAPALGLPDL | | |
| | TKPFELFVDEKQGYAKGVLTQKLGPWRRPVAY | | |
| | LSKKLDPVAAGWPPCLRMVAAIAVLTKDAGKL | | |
| | TMGQPLVILAPHAVEALVKQPPDRWLSNARMT | | |
| | HYQALLLDTDRVQFGPIVALNPATLLPLPEEGL | | |
| | QHDCLDILAEAHGTRPDLTDQPLPDADHTWYT | | |
| | DGSSFLQEGQRKAGAAVTTETEVVWAKALPAG | | |
| | TSAQRAELIALTQALKMAEGKKLNVYTDSRYA | | |
| | FATAHIHGEIYRRRGLLTSEGKEIKNKDEILALL | | |
| | KALFLPKRLSIIHCPGHQKGNRAEARGNRMADQ | | |
| | AAREVATRETPETSTLLIENSAP | | |
| 8276 | TLNIEDEYRLHETSKGPDVPLGSTWLSDFPQAW | P26810 | Friend murine |
| | AETGGMGLAFRQAPLIISLKATSTPVSIKQYPMS | | leukemia virus |
| | QEARLGIKPHIQRLLDQGILVPCQSPWNTPLLPV | | (ISOLATE 57) |
| | KKPGTNDYRPVQDLREVNKRVEDIHPTVPNPY | | |
| | NLLSGLPPSHQWYTVLDLKDAFFCLRLHPTSQS | | |
| | LFAFEWKDPEMGISGQLTWTRLPQGFKNSPTLF | | |
| | DEALHRDLADFRIQHPDLILLQYVDDLLLAATS | | |
| | ELDCQQGTRALLQTLGDLGYRASAKKAQICQK | | |
| | QVKYLGYLLKEGQRWLTEARKETVMGQPTPKT | | |
| | PRQLREFLGTAGLCRLWIPGFAEMAAPLYPLTK | | |
| | TGTLFKWGPDQQKAYQEIKQALLTAPALGLPD | | |
| | LTKPFELFVDEKQGYAKGVLTQKLGPWRRPVA | | |
| | YLSKKLDPVAAGWPPCLRMVAAIAVLTKDVGK | | |
| | LTMGQPLVILAPHAVEALVKQPPDRWLSNARM | | |
| | THYQALLLDTDRVQFGPIVALNPATLLPLPEEGL | | |
| | QHDCLDILAEAHGTRPDLTDQPLPDADHTWYT | | |
| | DGSSFLQEGQRRAGAAVTTETEVIWAKALPAG | | |
| | TSAQRAELIALTQALKMAAGKKLNVYTDSRYA | | |
| | FATAHIHGEIYRRRGLLTSEGKEIKNKDEILALL | | |
| | KALFLPKRLSIIHCPGHQKGNHAEARGNRMAD | | |
| | QAAREVATRETPETSTLLIENSAP | | |
| 8277 | TLNIEDEYRLHETSKEPDVPLGSTWLSDFPQAW | Q2F7J0 | Xenotropic |
| | AETGGMGLAVRQAPLIIPLKATSTPVSIKQYPMS | | MuLV-related |
| | QEARLGIKPHIQRLLDQGILVPCQSPWNTPLLPV | | virus VP42 |
| | KKPGTNDYRPVQDLREVNKRVEDIHPTVPNPY | | |
| | NLLSGLPPSHQWYTVLDLKDAFFCLRLHPTSQP | | |
| | LFAFEWRDPEMGISGQLTWTRLPQGFKNSPTLF | | |
| | DEALHRDLADFRIQHPDLILLQYVDDLLLAATS | | |
| | EQDCQRGTRALLQTLGNLGYRASAKKAQICQK | | |
| | QVKYLGYLLKEGQRWLTEARKETVMGQPTPKT | | |
| | PRQLREFLGTAGFCRLWIPGFAEMAAPLYPLTK | | |
| | TGTLFNWGPDQQKAYQEIKQALLTAPALGLPD | | |
| | LTKPFELFVDEKQGYAKGVLTQKLGPWRRPVA | | |
| | YLSKKLDPVAAGWPPCLRMVAAIAVLTKDAGK | | |
| | LTMGQPLVILAPHAVEALVKQPPDRWLSNARM | | |
| | THYQAMLLDTDRVQFGPVVALNPATLLPLPEK | | |
| | EAPHDCLEILAETHGTRPDLTDQPIPDADYTWY | | |
| | TDGGSFLQEGQRRAGAAVTTETEVIWGGVLPA | | |
| | GTSAQRAELIALTQALKMAEGKKLNVYTDSRY | | |
| | AFATAHVHGEIYRRRGLLTSEGREIKNKNEILAL | | |
| | LKALFLPKRLSIIHCPGHQKGNSAEARGNRMAD | | |
| | QAAREAAMKAVLETSTLLIEDSTP | | |
| 8278 | PHIQRLLDQGILVPCQSPWNTPLLPVKKPGTND | P03355 | Moloney murine |
| | YRPVQDLREVNKRVEDIHPTVPNPYNLLSGLPP | | leukemia virus |
| | SHQWYTVLDLKDAFFCLRLHPTSQPLFAFEWR | | isolate Shinnick |
| | DPEMGISGQLTWTRLPQGFKNSPTLFDEALHRD | | |
| | LADFRIQHPDLILLQYVDDLLLAATSELDCQQG | | |
| | TRALLQTLGNLGYRASAKKAQICQKQVKYLGY | | |
| | LLKEGQRWLTEARKETVMGQPTPKTPRQLREF | | |
| | LGTAGFCRLWIPGFAEMAAPLYPLTKTGTLFNW | | |
| | GPDQQKAYQEIKQALLTAPALGLPDLTKPFELF | | |
| | VDEKQGYAKGVLTQKLGPWRRPVAYLSKKLD | | |
| | PVAAGWPPCLRMVAAIAVLTKDAGKLTMGQPL | | |
| | VILAPHAVEALVKQPPDRWLSNARMTHYQALL | | |
| | LDTDRVQFGPVVALNPATLLPLPEEGLQHNCLD | | |
| | ILAEAHGTRPDLTDQPLPDADHTWYTDGSSLLQ | | |
| | EGQRKAGAAVTTETEVIWAKALPAGTSAQRAE | | |
| | LIALTQALKMAEGKKLNVYTDSRYAFATAHIH | | |
| | GEIYRRRGLLTSEGKEIKNKDEILALLKALFLPK | | |
| | RLSIIHCPGHQKGHSAEARGNRMADQAARKAAI | | |
| | TE | | |
| 8279 | TLNLEDEYRLYETSAEPEASPGSTWLSDFPQAW | Q9WHV7 | Murine leukemia |
| | AETGGMGLAVRRRPLIIPLNATSTPVSIKQYPMS | | virus |
| | QEARLGIKPHIQRLLDQGILVPCQSPWNTPCLPV | | |
| | KKPGTNDYRPVQDLREVNKRVEDIHPTVPNPY | | |
| | NLLSGLPPSHRWYTVLDLKDAFFCLRLHPTSQP | | |
| | LFAFEWRDPGMGISGQLTWTRLPQGFKNSPTLF | | |
| | DEALHRDLADFRIQHPDLILLQYVDDILLAATSE | | |
| | LDCQQGTRALLLTLGNLGYRASAKKAQLCQKQ | | |
| | VKYLGYLLREGQRCLTEARKETVRGQPTPKTPR | | |
| | QLREFLGTAGFCRLWIPGFAEMAAPLYPLTKTG | | |
| | TLFNWGPDQQKAYQEIKQALLTAPALGLPDLT | | |
| | KPFELFVDEKQGYAKGSLTQKLGPWRRPVAYL | | |
| | SKKLDPVAAGWPPCLRMVAAIAVLRKDAGKLT | | |
| | MGQPLVILAPHADEALVKQPPDRWLSNARMTH | | |
| | YQAMLLDTDRVQFGPVVALNPSTFIPLPEEGAP | | |
| | HDCLEILAETHGTRPDLTDQPIPDADHTWYTDG | | |
| | SSFLQEGQRKAGAAVTTETEVIWARALPAGTSA | | |
| | QRELIALTQALKMAEGKRLNVYTDSRYAFATA | | |
| | HIHGEIYRRRGLLTSEGREIKNKSEILALLKALFL | | |
| | PKRLSIIHCLGHQKGDSAEARGNRLADQAAREA | | |
| | AINTPPDTSTLLIEDSTP | | |
| 8280 | TLNIEDEYRLHEISTEPDVSPGSTWLSDFPQAWA | P11227 | Radiation murine |
| | ETGGMGLAVRQAPLIIPLKATSTPVSIKQYPMSQ | | leukemia virus |
| | EAKLGIKPHIQRLLDQGILVPCQSPWNTPLLPVK | | |
| | KPGTNDYRPVQGLREVNKRVEDIHPTVPNPYNL | | |
| | LSGLPTSHRWYTVLDLKDAFFCLRLHPTSQPLF | | |
| | ASEWRDPGMGISGQLTWTRLPQGFKNSPTLFDE | | |
| | ALHRGLADFRIQHPDLILLQYVDDLLLAATSEL | | |
| | DCQQGTRALLKTLGNLGYRASAKKAQICQKQV | | |
| | KYLGYLLREGQRWLTEARKETVMGQPTPKTPR | | |
| | QLREFLGTAGFCRLWIPRFAEMAAPLYPLTKTG | | |
| | TLFNWGPDQQKAYHEIKQALLTAPALGLPDLT | | |
| | KPFELFVDEKQGYAKGVLTQKLGPWRRPVAYL | | |
| | SKKLDPVAAGWPPCLRMVAAIAVLTKDAGKLT | | |
| | MGQPLVILAPHAVEALVKQPPDRWLSNARMTH | | |
| | YQAMLLDTDRVQFGPVVALNPATLLPLPEEGAP | | |
| | HDCLEILAETHGTEPDLTDQPIPDADHTWYTDG | | |
| | SSFLQEGQRKAGAAVTTETEVIWARALPAGTSA | | |
| | QRAELIALTQALKMAEGKRLNVYTDSRYAFAT | | |
| | AHIHGEIYKRRGLLTSEGREIKNKSEILALLKALF | | |
| | LPKRLSIIHCLGHQKGDSAEARGNRLADQAARE | | |
| | AAIKTPPDTSTLLIEDSTP | | |
| 8281 | TLGIEDEYRLHETSTEPDVSLGSTWLSDFPQAW | Q7SVK7 | Murine leukemia |
| | AETGGMGLAVRQAPLIIPLKATSTPVSIQQYPMS | | virus (strain |
| | HEARLGIKPHIQRLLDQGILVPCQSPWNTPLLPV | | BM5 ECO) |
| | KKPGTNDYRPVQDLREVNKRVEDIHPTVPNPY | | |
| | NLLSGLPPSHQWYTVLDLKDAFFCLRLHPTSQP | | |
| | LFAFEWRDPGMGISGQLTWTRLPQGFKNSPTLF | | |
| | DEALHRDLADFRIQHPDLILLQYVDDILLAATSE | | |
| | LDCQQGTRALLQTLGDLGYRASAKKAQICQKQ | | |
| | VKYLGYLLREGQRWLTEARKETVMGQPVPKTP | | |
| | RQLREFLGTAGFCRLWIPGFAEMAAPLYPLTKT | | |
| | GTLFSWGPDQQKAYQEIKQALLTAPALGLPDLT | | |
| | KPFELFVDEKQGYAKGVLTQKLGPWRRPVAYL | | |
| | SKKLDPVAAGWPPCLRMVAAIAVLTKDAGKLT | | |
| | MGQPLVILAPHAVEALVKQPPDRWLSNARMTH | | |
| | YQAMLLDTDRVQFGPVVALNPATLLPLPEEGAP | | |
| | HDCLEILAETHGTRPDLTDQPIPDADHTWYTDG | | |
| | SSFLQEGQRKAGAAVTTETEVIWAGALPAGTSA | | |
| | QRAELIALTQALKMAEGKRLNVYTDSRYAFAT | | |
| | AHIHGEIYRRRGLLTSEGREIKNKSEILALLKALF | | |
| | LPKRLSIIHCLGHQKGDSAEARGNRLADQAARE | | |
| | AAIKTPPDTSTLLIEDSTP | | |
| 8282 | TLNLEDEYRLYETSAEPEASPGSTWLSDFPQAW | Q90RL4 | Murine leukemia |
| | AETGGMGLAVRQAPLIIPLKATSTPVSIKQYPMS | | virus |
| | QEARLGIKPHIQRLLDQGILVPCQSPWNTPLLPV | | |
| | KKPGTNDYRPVQDLREVNKRVEDIHPTVPNPY | | |
| | NLLSGLPPSHRWYTVLDLKDAFFCLRLHPTSQP | | |
| | LFAFEWRDPGMGISGQLTWTRLPQGFKNSPTLF | | |
| | DEALHRDLAGFRIQHPDLILLQYVDDLLLAATS | | |
| | ELDCQQGTRALLQTLGDLGYRASAKKAQICQK | | |
| | QVKYLGYLLKEGQRWLTEARKETVMGQPIPKT | | |
| | PRQLREFLGTAGFCRLWIPGFAEMAAPLYPLTK | | |
| | TGTLFNWGPDQQKAYQEIKQALLTAPALGLPD | | |
| | LTKPFELFVDEKQGYAKGVLTQKLGPWRRSVA | | |
| | YLSKKLDPVAAGWPPCLRMVAAIAVLTKDAGK | | |
| | LTMGQPLVILAPHAEEALVKQPPDRWLSNARM | | |
| | THYQAMLLDTDRVQFGPVVALNPATLLPLPEE | | |
| | GAPHDCLEILAETHGTRPDLTDQPIPDADHTWY | | |
| | SDGSSFLQEGQRKAGAAVTTETEVIWARALPAG | | |
| | TSAQRAELIALTQALKMAEGKRLNVYTDSRYA | | |
| | FATAHIHGEIYRRRGLLTSEGREIKNKSEILALLK | | |
| | ALFLPKRLSIIHCLGHQKGDSAEARGNRLADQA | | |
| | AREAAIKTPPDTSTLLIEDSTP | | |
| 8283 | TLNLEDEYRLYETSAEPEVSPGSTWLSDFPQAW | P03356 | AKR |
| | AETGGMGLAVRQAPLIIPLKATSTPVSIKQYPMS | | (endogenous) |
| | QEAKLGIKPHIQRLLDQGILVPCQSPWNTPLLPV | | murine leukemia |
| | KKPGTNDYRPVQDLREVNKRVEDIHPTVPNPY | | virus |
| | NLLSGLPPSHRWYTVLDLKDAFFCLRLHPTSQP | | |
| | LFAFEWRDPGMGISGQLTWTRLPQGFKNSPTLF | | |
| | DEALHRDLADFRIQHPDLILLQYVDDILLAATSE | | |
| | LDCQQGTRALLLTLGNLGYRASAKKAQLCQKQ | | |
| | VKYLGYLLKEGQRWLTEARKETVMGQPTPKTP | | |
| | RQLREFLGTAGFCRLWIPGFAEMAAPLYPLTKT | | |
| | GTLFNWGPDQQKAYQEIKQALLTAPALGLPDL | | |
| | TKPFELFVDEKQGYAKGVLTQKLGPWRRPVAY | | |
| | LSKKLDPVAAGWPPCLRMVAAIAVLRKDAGKL | | |
| | TMGQPLVILAPHAVEALVKQPPDRWLSNARMT | | |
| | HYQAMLLDTDRVQFGPVVALNPATLLPLPEEG | | |
| | APHDCLEILAETHGTRPDLTDQPIPDADHTWYT | | |
| | DGSSFLQEGQRKAGAAVTTETEVIWARALPAG | | |
| | TSAQRAELIALTQALKMAEGKRLNVYTDSRYA | | |
| | FATAHIHGEIYRRRGLLTSEGREIKNKSEILALLK | | |
| | ALFLPKRLSIIHCLGHQKGDSAEARGNRLADQA | | |
| | AREAAIKTPPDTSTLLIEDSTP | | |
| 8284 | TLQLEDEYRLYEPEQDKPKSPEIDSWVTKFPLA | Q7ZKZ7 | Recombinant M- |
| | WAETGGMGLALQQPPLIIQLKATATPVSIKQYP | | MuLV/RaLV |
| | MSWEAYQGIKPHIRRLLDQGILVPCRSPWNTPL | | retrovirus |
| | LPVKKPGTGDYRPVQDLREVNKRVEDIHPTVPN | | |
| | PYNLLSTLQTTHTWYTVLDLKDAFFCLRLSPES | | |
| | QPLFAFEWKDSEMGLSGQLTWTRLPQGFKNSP | | |
| | TLFDEALHRDLADFRVQHPTLILLQFVDDLLLG | | |
| | ATSETACHQGTESLLQTLGRLGYRASARKAQIC | | |
| | QTQVTYLGYQLRDGQRWLTPARKQTVANIPAP | | |
| | RNGRQLREFLGTAGFCRLWIPGFAEMAAPLYPL | | |
| | TKQGVLFQWGAEQQEAFDNIKRALLSSPALGLP | | |
| | DITKPFELFVDEKQGYAKGVLTQRLGPWKRPV | | |
| | AYLSKKLDPVASGWPPCLRMVAAIAVLTKDAG | | |
| | KLTLGQPLTILAPHAVEALIKQPPDCWLSNSRM | | |
| | THYQALLLDAERVQFGPVVALNPATLLPLPEEA | | |
| | EQHDCLQILAEVHGTRPDLSDRPLQDADHTWY | | |
| | TDGSSYLVNGERKAGAAVTTEDKVIWASALPV | | |
| | GTSAQRAELIALTQALKMAEGKRLNVYTDSRY | | |
| | AFATAHIHGEIYRRRGLLTSEGKDIKNKTEILAL | | |
| | LAALFLPKRLSIIHCPGHQKGHSPEARGNRLAD | | |
| | VSAREAAMGTQVLSLKDQDQPTSP | | |
| 8285 | TLQLEDEYRLYEPEQDKPKSLEIDSWATKFPLA | Q7ZKZ9 | Recombinant M- |
| | WAETGGMGLALQQPSLIIQLKSTATPSSIKQYP | | MuLV/RaLV |
| | MSWEAYQGIKPHIRRLLDQGILVPCRSPWNMPL | | retrovirus |
| | LPVKKPGTGDYRPVQDLREVNKRVEDIHPTVPN | | |
| | PYNLLSTLPPTHTWYTVLDLKDAIFCLRLSPESQ | | |
| | PLFAFEWKDSEMGLSGQLTWTRLPQGFKNSPM | | |
| | LFDEALHRDLADFRVQHPTLILLQFVDDLLLGA | | |
| | TSETACHQGTESLLQTLGRLGYRASARKAQICQ | | |
| | TQVTYLGYQLRDGQRWLTPARKQTVANIPAPR | | |
| | NGRQLREFLGTAGFCRLWIPGFAEMAAPLYPLT | | |
| | KQGVLFQWGAEQQEAFDNIKRALLSSSALGLPE | | |
| | ITKPFELFVDEKQGYAKGVLTQRLGPWNHPVA | | |
| | YLSKKLDPVASGWPPCLRMVAAIAVLTKDAGK | | |
| | LTLGQPLTILAPHAVEALIKQPPGRWLSNSRMT | | |
| | HYQALLLDAEWVQFGPVVALNPATLLPLTEEA | | |
| | EQHDCLQILAEVHGIRPDLSDRPLQDADHTWYT | | |
| | DGSSYLVNGERKAGAAVTTEDKVIWASALPVG | | |
| | TSAQRAELIALTQALKMAEGKRLNVYTDRHYA | | |
| | FATAHIHGEIYQRRGLLTSEGKDIKNKTEIQALL | | |
| | AALFLPKRLRIIHCPGHQKGHSPEARGNRLADV | | |
| | SAPEAAMGTQVLFLKDQDQPTSP | | |
| 8286 | PLQLEDEYRLYEPEQAKPKSLEIDSWVTKFPLA | Q7ZKZ5 | Recombinant M- |
| | WAETGGMGLALQQPPLIIQLKATATPVSIKQYP | | MuLV/RaLV |
| | MSWEAYQGIKPHIRRLLDQGILVPCWSPWNTPL | | retrovirus |
| | LPVKKPGTGDYRPVQDLREVNKRVEDIHPAVP | | |
| | NPYNLLSTLPPTHTWYMVLDLKDAFFCLRLSPE | | |
| | SQPLFAFEWKDSEMGLSGQLTWTRLPQGFKNSP | | |
| | TLFDEALHRDLADFRVQHPTLILLQFVDDLLLG | | |
| | ATSETACHQGTESLLQTLGRLGYRASARKAQIC | | |
| | QTQVTYLGYQLRDGQRWLTPARKQTVANIPAP | | |
| | RNGRQLREFLGTAGFCRLWIPGFAEMAAPLYPL | | |
| | TKQGVLFQWGAEQQEAFDNIKRALLSSPALGLP | | |
| | DITKPFELFVDEKQGCAKGVLTQRLGPWKCPV | | |
| | VYLSKKLDPVASGCSPCLRMVAAIAVLTKDAG | | |
| | KLTLGQPLTILAPHAVEALIKQPPDRWLSNSRM | | |
| | THYQALLLDAEWVQFGPVVALNPATLLPLTEE | | |
| | AEQHDCLQILAEVHGIRPDLSDRPLQDADHTWY | | |
| | TDGSSYLVNGERKAGAAVTTEDKVIWASALPV | | |
| | GTSAQRAELIALTQALKMAEGKRLNVYTDRHY | | |
| | AFATAHIHGEIYQRRGLLTSEGKDIKNKTEIQAL | | |
| | LAALFLPKRLRIIHCPGHQKGHSPEARGNRLAD | | |
| | VSAPEAAMGTQVLFLKDQDQPTSP | | |
| 8287 | TLQLEEEYRLFEPESTQKQEMDIWLKNFPQAWA | P10273 | Feline leukemia |
| | ETGGMGTAHCQAPVLIQLKATATPISIRQYPMP | | virus |
| | HEAYQGIKPHIRRMLDQGILKPCQSPWNTPLLP | | |
| | VKKPGTEDYRPVQDLREVNKRVEDIHPTVPNPY | | |
| | NLLSTLPPSHPWYTVLDLKDAFFCLRLHSESQLL | | |
| | FAFEWRDPEIGLSGQLTWTRLPQGFKNSPTLFD | | |
| | EALHSDLADFRVRYPALVLLQYVDDLLLAAAT | | |
| | RTECLEGTKALLETLGNKGYRASAKKAQICLQE | | |
| | VTYLGYSLKDGQRWLTKARKEAILSIPVPKNSR | | |
| | QVREFLGTAGYCRLWIPGFAELAAPLYPLTRPG | | |
| | TLFQWGTEQQLAFEDIKKALLSSPALGLPDITKP | | |
| | FELFIDENSGFAKGVLVQKLGPWKRPVAYLSKK | | |
| | LDTVASGWPPCLRMVAAIAILVKDAGKLTLGQ | | |
| | PLTILTSHPVEALVRQPPNKWLSNARMTHYQA | | |
| | MLLDAERVHFGPTVSLNPATLLPLPSGGNHHDC | | |
| | LQILAETHGTRPDLTDQPLPDADLTWYTDGSSFI | | |
| | RNGEREAGAAVTTESEVIWAAPLPPGTSAQRAE | | |
| | LIALTQALKMAEGKKLTVYTDSRYAFATTHVH | | |
| | GEIYRRRGLLTSEGKEIKNKNEILALLEALFLPK | | |
| | RLSIIHCPGHQKGDSPQAKGNRLADDTAKKAAT | | |
| | ETHSSLTVLPTELIEG | | |
| 8288 | TVSLQDEHRLFDIPVTTSLPDVWLQDFPQAWAE | P10272 | Baboon |
| | TGGLGRAKCQAPIIIDLKPTAVPVSIKQYPMSLE | | endogenous |
| | AHMGIRQHIIKFLELGVLRPCRSPWNTPLLPVKK | | virus strain M7 |
| | PGTQDYRPVQDLREINKRTVDIHPTVPNPYNLLS | | |
| | TLKPDYSWYTVLDLKDAFFCLPLAPQSQELFAF | | |
| | EWKDPERGISGQLTWTRLPQGFKNSPTLFDEAL | | |
| | HRDLTDFRTQHPEVTLLQYVDDLLLAAPTKKA | | |
| | CTQGTRHLLQELGEKGYRASAKKAQICQTKVT | | |
| | YLGYILSEGKRWLTPGRIETVARIPPPRNPREVR | | |
| | EFLGTAGFCRLWIPGFAELAAPLYALTKESTPFT | | |
| | WQTEHQLAFEALKKALLSAPALGLPDTSKPFTL | | |
| | FLDERQGIAKGVLTQKLGPWKRPVAYLSKKLD | | |
| | PVAAGWPPCLRIMAATAMLVKDSAKLTLGQPL | | |
| | TVITPHTLEAIVRQPPDRWITNARLTHYQALLLD | | |
| | TDRVQFGPPVTLNPATLLPVPENQPSPHDCRQV | | |
| | LAETHGTREDLKDQELPDADHTWYTDGSSYLD | | |
| | SGTRRAGAAVVDGHNTIWAQSLPPGTSAQKAE | | |
| | LIALTKALELSKGKKANIYTDSRYAFATAHTHG | | |
| | SIYERRGLLTSEGKEIKNKAEIIALLKALFLPQEV | | |
| | AIIHCPGHQKGQDPVAVGNRQADRVARQAAM | | |
| | AEVLTLATEPDNTSH | | |
| 8289 | LQDFPQAWAETGGLGRAKCQVPIIIDLKPTAMP | P31792 | Feline |
| | VSIRQYPMSKEAHMGIQPHITRFLELGVLRPCRS | | endogenous |
| | PWNTPLLPVKKPGTRDYRPVQDLREVNKRTMD | | virus ECE1 |
| | IHPTVPNPYNLLSTLSPDRTWYTVLDLKDAFFCL | | |
| | PLAPQSQELFAFEWRDPERGISGQLTWTRLPQG | | |
| | FKNSPTLFDEALHRDLTDFRTQHPEVTLLQYVD | | |
| | DLLLAAPTKEACIRGTKHLLRELGDKGYRASAK | | |
| | KAQICQTKVTYLGYILSEGKRWLTPGRIETVAHI | | |
| | PPPQNPREVREFLGTAGFCRLWIPGFAELAAPLY | | |
| | ALTKESAPFTWQEKHQSAFEALKEALLSAPALG | | |
| | LPDTSKPFTLFIDEKQGIAKGVLTQKLGPWKRP | | |
| | VAYLSKKLDPVAAGWPPCLRIMAATAMLVKDS | | |
| | AKLTLGQPLTVITPHALEAIVRQTPDRWITNARL | | |
| | THYQALLLDTDRIQFGPPVTLNPATLLPAPEDQ | | |
| | QSAHDCRQVLAETHGTREDLKDQELPDADHSW | | |
| | YTDGSSYIDSGTRRAGAAVVDGHHIIWAQSLPP | | |
| | GTSAQKAELIALTKALELSEGKKANIYTDSRYA | | |
| | FATAHTHGSIYERRGLLTSEGKEIKNKAEIIALL | | |
| | KALFLPRKVAIIHCPGHQKGQDPIATGNRQADQ | | |
| | VARQVAVAETLTLTTKLEETNL | | |
| | TLQLDDEYRLFSPPVKLDQNIQFGSTQFPQALAE | | |
| 8290 | PAGMGLAKQVPPQVIQLKPSLAPVPVRQSPFSK | Q8Q6U4 | Porcine |
| | EAREGIRPHVQRLIQQGIIVPVQSPWNTPLLPVR | | endogenous |
| | KPGTNDYRPVQDFERGQKRVQDIHPTVPNPYNL | | retrovirus |
| | LCALPPQRSWYTVLDLKDAFFCLRLHPTSQPLF | | |
| | AFEWRDPGAGRTGQLTWTRLPQGFKNFPTIFDQ | | |
| | ALHRDLANFRIQHPQVTLLQYVDDLVLAAATK | | |
| | QDCLQRPKGLLVELSDLGDRAFGYKAHICPTEV | | |
| | TYLGYRLRGRHRWLTEAPQTTVVQIPGPTPAKQ | | |
| | VREFLGTVGFCRLWIPGFATLPAPLYPLPKEKGE | | |
| | FSWALQHQKAFDAIKKALLSAPALALPDVTKTL | | |
| | YVDERKGVARGVLTQTLGPWRRPVAYLSKKLD | | |
| | PVASGWPICLKAIAAVAILVKDADKLTLGQNIT | | |
| | VIAPHALENIVRQPPDRWMTNARMTHYQSLLL | | |
| | TERVTFAPPAALNPATLLPEETDEPLTHDCHQLL | | |
| | IEETGVRKDLTDIPLTGEPVTWFTDGSSYLVEGN | | |
| | KMAGAAVVDRTPTIWGTNLPERTSSQKGELIGL | | |
| | MQAFRLGQGKSINIYTDSRYAFATAHVHGAIYT | | |
| | QRGLLTSAGREIKNKEEILSLLEALHLPKRLAIIH | | |
| | CPGHQKAKDPISRGNQMADRVAKQAAQGVNL | | |
| | LPMIETPKAP | | |
| 8291 | TLQLDEYRLYSPLVKPDQNIQFWLEQFPKAWAE | Q8Q6U7 | Porcine |
| | TAGMGLAKQVPPQVIQLKASAAPVSVRQYLLS | | endogenous |
| | KEAREGIGPHVQRLIQQGILVPVQSPWNTPLLPV | | retrovirus |
| | RKPGTNDYRPVQDLREVNKRVQDIHPTVPNPY | | |
| | NLLCALPPQRSWYTVLDLKDAFFCLRLHPTSQP | | |
| | LFAFEWRDPGAGRTGQLTWTRLPQGFKNSPTIF | | |
| | DEALHRDLANFRIQHPQVTLLQYVDDLLLAGA | | |
| | TKQDCLEGLLLELFDLGYRASAKKAQICRREAT | | |
| | QLGVQVCGAGQSDWLTGKARKKTVQPKIGPPT | | |
| | TAKQVVREFFGAQVGFCRLWIPGFATLAAPLYP | | |
| | LTKEKGEFSWALEHQKAFDAIKKALSSAPALAL | | |
| | PDVLKPFTLYVDERKGVARGVLTQILGPWRRPV | | |
| | AYLSKKLDPVASGWPICLKAIAAVAILVKDADK | | |
| | LTLGQNITVIAPHALENIVRQPPDRWMTNARMT | | |
| | HYQSLLLTERVTFAPPAALNPATLLPEETDEPVT | | |
| | HDCHLLIEETGVRKDLTDIPPLTGKMLTWFTDG | | |
| | SSYVVEGKSMAGPPVVTGTRTIWASSLPEGTSA | | |
| | QKAELMALTQALRLAEGKSINIYTDSRYAFATA | | |
| | HVHGAIYKQRGLLTSAGREIKTKEEILSLLEALH | | |
| | LPKRLAIIHCPGHQKAKDPISRGNQMADRVAKQ | | |
| | AAQGVNLLPMIETPKAP | | |
| 8292 | TLQLDDEYRLYSPLVKPDQNIQSWLEQFPQAW | ADK35878.1 | Porcine |
| | AETAGMGLAKQVPPQVIQLKASATPISVRQYPL | | endogenous |
| | SREAREEIWPHVQRLIQQGILVPVRSPWNTPLLP | | retrovirus C |
| | VRKPGTNDYRPVQDLREVNKRVQDIHPMVPNP | | |
| | YNLLSALPPKRNWYTVLDLKNAFFCLRLHPTSQ | | |
| | PLFAFEWRDPGTGRTGQLTWTRLPQGFKNSPTI | | |
| | FDEALHRDLANFRIQHPQVTLLQYVDDLLLAGA | | |
| | TKQDCLEGTNALLLELSDLGYRASAKKAQICRR | | |
| | EVTYLGYSLRDGQRWLTEARKRTVVQILAPTT | | |
| | AKQVREFLGTAGFCRLWIPGFATLAAPLYPLTK | | |
| | EKGEFSWAPEHQKAFDAIKKALLSAPALALPDV | | |
| | TKPFTLYVDEHKGVARGVLTQSLGPWRRPVAY | | |
| | LSKKLDPVASGWPVCLKAIAAVAILVKDADKST | | |
| | LGQNITVIAPHALENIVRQPPDRWMTNARMTH | | |
| | YQSLLLTERITFAPPAALNPATLLPEETDEPVTH | | |
| | DCHQLLIEETGVRKDLTDIPLTGEVLTWFTDGSS | | |
| | YVVEGKRMARAAVVDGTRTIWASSLSEGTSAQ | | |
| | KAELVALTQALRLAEGKSINIYTDSRYAFATAH | | |
| | VHGAIYKQRGLLTSAGREVKNKEKILSLLEALH | | |
| | LPKRLAIIHCPGHQKAKDLISRGNQMADRVAKQ | | |
| | AAQGVNLLPIIETPKAP | | |
| 8293 | TLQLDDEYRLYSPLVKPDQNIQFWLEQFPQAW | Q5QGQ8 | Porcine |
| | AETAGMGLAKQVPPQVIQLKASATPVSVRQYP | | endogenous |
| | LSKEAQEGIRPHVQRLIQQGILVPVQSPWNTPLL | | retrovirus C/A |
| | PVRKPGTNDYRPVQDLREVNKRVQDIHPTVPNP | | |
| | YNLLCALPPQRSWYTVLDLKDAFFCLRLHPTSQ | | |
| | PLFAFEWRDPGTGRTGQLTWTRLPQGFKNSPTI | | |
| | FDEALHRDLANFRIQHPQVTLLQYVDDLLLAGA | | |
| | TKQDCLEGTKALLLELSDLGYRASAKKAQICRR | | |
| | EVTYLGYSLRDGQRWLTEARKKTVVQIPAPTT | | |
| | AKQMREFLGTAGFCRLWIPGFATLAAPLYPLTK | | |
| | EKGEFSWAPEHQKAFDAIKKALLSAPALALPDV | | |
| | TKPFTLYVDERKGVARGVLTQTLGPWRRPVAY | | |
| | LSKKLDPVASGWPICLKAIAAVAILVKDADKLT | | |
| | LGQNITVIAPHALENIVRQPPDRWMTNARMTH | | |
| | YQSLLLTERVTFAPPAALNPATLLPEETDEPVTH | | |
| | DCHQLLIEETGVRKDLTDIPLTGEVLTWFTDGSS | | |
| | YVVEGKRMAGAAVVDGTRTIWASSLPEGTSAQ | | |
| | KAELMALTQALRLAEGKSINIYTDSRYAFATAH | | |
| | VHGAIYKQRGLLTSAGREIKNKEEILSLLEAVHL | | |
| | PKRLAIIHCPGHQKAKDLISRGNQMADRVAKQ | | |
| | AAQGVNLLPIIEMPKAP | | |
| 8294 | TLQLDDEYRLYSPLVKPDQNIQFWLEQFPQAW | Q4VFZ2 | Porcine |
| | AETAGMGLAKQVPPQVIQLKASATPVSVRQYP | | endogenous |
| | LSKEAQEGIRPHVQRLIQQGILVPVQSPWNTPLL | | retrovirus C/A |
| | PVRKPGTNDYRPVQDLREVNKRVQDIHPTVPNP | | |
| | YNLLCALPPQRSWYTVLDLKDAFFCLRLHPTSQ | | |
| | PLFAFEWRDPGTGRTGQLTWTRLPQGFKNSPTI | | |
| | FDEALHRDLANFRIQHPQVTLLQYVDDLLLAGA | | |
| | TKQDCLEGTKALLLELSDLGYRASAKKAQICRR | | |
| | EVTYLGYSLRDGQRWLTEARKKTVVQIPAPTT | | |
| | AKQVREFLGTAGFCRLWIPGFATLAAPLYPLTK | | |
| | EKGEFSWAPEHQKAFDAIKKALLSAPALALPDV | | |
| | TKPFTLYVDERKGVARGVLTQTLGPWRRPVAY | | |
| | LSKKLDPVASGWPVCLKAIAAVAILVKDADKL | | |
| | TLGQNITVIAPHALENIVRQPPDRWMTNARMTH | | |
| | YQSLLLTERVTFAPPAALNPATLLPEETDEPVTH | | |
| | DCHQLLIEETGVRKDLTDIPLTGEVLTWFTDGSS | | |
| | YVVEGKRMAGAAVVDGTRTIWASSLPEGTSAQ | | |
| | KAELMALTQALRLAEGKSINIYTDSRYAFATAH | | |
| | VHGAIYKQRGLLTSAGREIKNKEEILSLLEALHL | | |
| | PKRLAIIHCPGHQKAKDPISRGNQMADRVAKQA | | |
| | AQGVNLLPMIETPKAP | | |
| 8295 | TLQLDDEYRLYSPLVKPDQNIQFWLEQFPQAW | Q90RL9 | Porcine |
| | AETAGMGLAKQVPPQVIQLKASAAPVSVRQYP | | endogenous |
| | LSKEAREGIRPHVQRLIQQGILVPVQSPWNTPLL | | retrovirus C |
| | PVRKPGTNDYRPVQDLREVNKRVQDIHPTVPNP | | |
| | YNLLCALPPQRSWYTVLDLKDAFFCLRLHPTSQ | | |
| | PLFAFEWRDPGAGRTGQLTWTRLPQGFKNSPTI | | |
| | FDEALHRDLANFRIQHPQVTLLQYVDDLLLAGA | | |
| | TKQDCLEGTKALLLELSDLGYRASAKKAQICRR | | |
| | EVTYLGYSLRGGQRWLTEARKRTVVQIPAPTTA | | |
| | KQVREFLGTAGFCRLWIPGFATLAAPLYPLTKE | | |
| | KGEFSWAPEHQKAFDAIKKALLSAPALALPDVT | | |
| | KPFTLYVDERKGVARGVLTQTLGPWRRPVAYL | | |
| | SKKLDPVASGWPICLKAIAAVAILVKDADKLTL | | |
| | GQNITVIAPHALENIVRQPPDRWMTNARMTHY | | |
| | QSLLLTERVTFAPPAALNPATLLPEETDEPVTHD | | |
| | CHQLLIEETGVRKDLTDIPLTGEMLTWFTDGSS | | |
| | YMVEGKRMAGAAVVDGTRTIWASSLPEGTSAQ | | |
| | KAELMALTQALRLAEGKSINIYTDSRYAFATAH | | |
| | VHGAIYKQRGLLTSAGREIKNKEEILSLLEALHL | | |
| | PKRLAIIHCPGHQKAKDPISRGNQMADRVAKQA | | |
| | AQGVNLLPMIETPKAP | | |
| 8296 | TLQLDDEYRLYSSLVKPDQNIQFWLEQFPQAW | Q8UM99 | Porcine |
| | AETAGMGLAKQVPPQVIQLKASAAPVSVRQYP | | endogenous |
| | LSKEAREGIRPHVQRLIQQGILVPVQSPWNTPLL | | retrovirus |
| | PVRKPGTNDYRPVQDLREVNKRVQDIHPTVPNP | | |
| | YNLLCALPPQRSWYTVLDLKDAFFCLRLHPTSQ | | |
| | PLFAFEWRDPGAGRTGQLTWTRLPQGFKNSPTI | | |
| | FDEALHRDLANFRIQHPQVTLLQYVDDLLLAGA | | |
| | TKQDCLEGTKALLLELSDLGYRASAKKAQICRR | | |
| | EVTYLGYSLRGGQRWLTEARKRTVVQIPAPTTA | | |
| | KQVREFLGTAGFCRLWIPGFATLAAPLYPLTKE | | |
| | KGEFSWAPEHQKAFDAIKKALLSAPALALPDVT | | |
| | KPFTLYVDERKGVARGVLTQTLGPWRRPVAYL | | |
| | SKKLDPVASGWPVCLKAIAAVAILVKDADKLT | | |
| | LGQNITVIAPHALENIVRQPPDRWMTNARMTH | | |
| | YQSLLLTERVTFAPPAALNPATLLPEETDEPVTH | | |
| | DCHQLLIEETGVRKDLTDIPLTGEVLTWFTDGSS | | |
| | YVVKGKRMAGPPVVDGTRTIWASSLPEGTSAQ | | |
| | KAELMALTQALRLAEGKSINIYTDSRYAFATAH | | |
| | VHGAIYKQRGLLTSAGREIKNKEEILSLLEALHL | | |
| | PKRLAIIHCPGHQKAKDPISRGNQMADRVAKQA | | |
| | AQGVNLLPMIETPKAP | | |
| 8297 | TPQLDDEYRLYSPQVKPDQDIQSWLEQFPQAW | A1YTJ2 | Porcine |
| | AETAGMGLAKQVPPQVIQLKASATPVSVRQYP | | endogenous |
| | LSREAREGIWPHVQRLIQQGILVPVQSPWNTPLL | | retrovirus C |
| | PVRKPGTNDYRPVQDLREVNKRVQDIHPTVPNP | | |
| | YNLLSALPPERNWYTVLDLKDAFFCLRLHPTSQ | | |
| | PLFAFEWRDPGTGRTGQLTWTRLPQGFKNSPTI | | |
| | FDEALHRDLANFRIQHPQVTLLQYVDDLLLAGA | | |
| | TKQDCSEGTKALLLELSDLGYRASAKKAQICRR | | |
| | EVTYLGYSLRDGQRWLTEARKKTVVQIPAPTT | | |
| | AKQVREFLGTAGFCRLWIPGFATLAAPLYPLTK | | |
| | EKGEFSWAPEHQKAFDAIKKALLSAPALALPDV | | |
| | TKPFTLYVDERKGVARGVLTQTLGPWRRPVAY | | |
| | LSKKLDPIASGWPVCLKAIAAVAILVKDADKLT | | |
| | LGQNITIIAPHALENIVRQPPDRWMTNARMTQY | | |
| | QSLLLTERITFAPPAALNPATLLPEETDEPVTHD | | |
| | CHQLLIEETGVRKDLIDIPLTGEVLTWFTDGSSY | | |
| | VVEGKRMAGAAVVDGTRTIWASSLPEGTSAQK | | |
| | AELMALTQALRLADGKSINIYTDSRYAFATAHV | | |
| | HGAIYKQRGLLTSAGREIKNKEEILSLLEALHLP | | |
| | KRLAIIHCPGHQKAKDPISRGNQMADRVAKQA | | |
| | AQGVNLLPIIETPKAP | | |
| 8298 | TLQLDDEYRLYSPQVKPDQDIQSWLEQFPQAW | Q8UM96 | Porcine |
| | AETAGMGLAKQVPPQVIQLKASATPVSVRQYP | | endogenous |
| | LSREAREGIWPHVQRLIQQGILVPVQSPWNTPLL | | retrovirus |
| | PVRKPGTNDYRPVQDLREVNKRVQDIHPTVPNP | | |
| | YNLLSALPPERNWYTVLDLKDAFFCLRLHPTSQ | | |
| | PLFAFEWRDPGTGRTGQLTWTRLPQGFKNSPTI | | |
| | FDEALHRDLANFRIQHPQVTLLQYVDDLLLAGA | | |
| | TKQDCLEGTKALLLELSDLGYRASAKKAQICRR | | |
| | EVTYLGYSLRGGQRWLTEARKKTVVQIPAPTT | | |
| | AKQVREFLGTAGFCRLWIPGFATLAAPLYPLTK | | |
| | EKGEFSWAPEHQKAFDAIKKALLSAPALALPDV | | |
| | TKPFTLYVDERKGVARGVLTQTLGPWRRPVAY | | |
| | LSKKLDPVASGWPICLKAIAAVAILVKDADKLT | | |
| | LGQNITVIAPHALENIVRQPPDRWMTNARMTH | | |
| | YQSLLLTERVTFAPPAALNPATLLPEETDEPVTH | | |
| | DCHQLLIEETGVRKDLTDIPLTGEVLTWFTDGSS | | |
| | YVVEGKRMAGAAVVDGTRTIXASSLPEGTSAQ | | |
| | KAELMALTQALRLAEGKSINIYTDSRYAFATAH | | |
| | VHGAIYKQRGLLTSAGREIKNKDEILSLLEALHL | | |
| | PKRLAIIHCPGHQKAKDLISRGNQMADRIAKQA | | |
| | AQAVNLLPIIETPKAP | | |
| 8299 | TLQLDDEYRLYSPQVKPDQDIQSWLEQFPQAW | ACD35951.1 | Porcine |
| | AETAGMGLAKQVPPQVIQLKASATPVSVRQYP | | endogenous |
| | LSREAREGIWPHVQRLIQQGILVPVQSPWNTPLL | | retrovirus |
| | PVRKPGTNDYRPVQDLREVNKRVQDIHPTVPNP | | |
| | YNLLSALPPERNWYTVLDLKDAFFCLRLHPTSQ | | |
| | PLFAFEWRDPGTGRTGQLTWTRLPQGFKNSPNI | | |
| | FDEALHRDLANFRIQHPQVTLLQYVDDLLLAGA | | |
| | TKQDCLEGTKALLLELSDLGYRASAKKAQICRR | | |
| | EVTYLGYSLRGGQRWLTEARKKTVVQIPAPTT | | |
| | AKQVREFLGTAGFCRLWIPGFATLAAPLYPLTK | | |
| | EKGEFSWAPEHQKAFDAIKKALLSAPALALPDV | | |
| | TKPFTLYVDERKGVARGVLTQTLGPWRRPVAY | | |
| | LSKKLDPVASGWPVCLKAIAAVAILVKDADKL | | |
| | TLGQNITVIAPHALENIVRQPPDRWMTNARMTH | | |
| | YQSLLLTERVTFAPPAALNPATLLPEETDEPVTH | | |
| | DCHQLLIEETGVRKDLTDIPLTGEVLTWFTDGSS | | |
| | YVVEGKRMAGAAVVDGTHTIWASSLPEGTSAQ | | |
| | KAELMALTQALRLAEGKSINIYTDSRYAFATAH | | |
| | VHGAIYKQRGLLTSAGREIKNKEEILSLLEALHL | | |
| | PKRLAIIHCPGHQKAKDLISRGNQMADRVAKQ | | |
| | AAQAVNLLPIIETPKAP | | |
| 8300 | VLSTEEEYRLHEEQPKGAAPLDWVTAFPNVWA | O89815 | Mus dunni |
| | EQAGMGLAKQVPPVVVELKADATPISVRQYPM | | endogenous |
| | SKEAKEGIRPHIRRLLDQGILVACQSPWNTPLLP | | virus |
| | VRKPGTNDYRPVQDLREVNKRVLDIHPTVPNPY | | |
| | NLLSSLPPERTWYTVLDLKDAFFCLRLHPKSQL | | |
| | LFAFEWRDPEGGQTGQLTWTRLPQGFKNSPTLF | | |
| | DEALHRDLAPFRAQNPQLTLLQYVDDLLIAAAS | | |
| | KELCQQGTERLLTELGNLGYRVSAKKAQICQTE | | |
| | VIYLGYTLRGGKRWLTEARKKTVMMIPPPTTPR | | |
| | QVREFLGTAGFCRLWIPGFATLAAPLYPLTREGI | | |
| | PFEWKEEHQRAFEAIKSSLMTAPALALPDLTKS | | |
| | FVLYVDERAGIARGVLTQALGPWKRPVAYLSK | | |
| | KLDPVASGWPTCLKAIAAVALLIKDADKLTMG | | |
| | QQVTVVAPHALESIVRQPPDRWMTNARMTHY | | |
| | QSLLLNDRVTFAPPAILNPATLLPLTNDSVPVHR | | |
| | CADILAEEIGTRKDLTDQPWPGAPSWYTDGSSF | | |
| | LIEGKRRAGAAVVDGKKVIWASALPEGTSAQK | | |
| | AELIALTQALREAEGKIINIYTDSRYAFATAHIH | | |
| | GAIYRQRGLLTSAGKDIKNKEEILALLEAIHAPK | | |
| | KVAIIHCPGHQKGEDLVAKGNRMADSVAKQVA | | |
| | QGAMILTEKGNPSKS | | |
| 8301 | VLNLEEEYRLHEKPVPPSIDPSWLQLFPMVWAE | Q9TTC1 | Koala retrovirus |
| | KAGMGLANQVPPVVVELKSDASPVAVRQYPM | | |
| | SKEAREGIRPHIQRFLDLGILVPCQSPWNTPLLP | | |
| | VKKPGTNDYRPVQDLREVNKRVQDIHPTVPNP | | |
| | YNLLSSLPPSHTWYSVLDLKDAFFCLKLHPNSQ | | |
| | PLFAFEWRDPEKGNTGQLTWTRLPQGFKNSPTL | | |
| | FDEALHRDLASFRALNPQVVMLQYVDDLLVAA | | |
| | PTYRDCKEGTRRLLQELSKLGYRVSAKKAQLC | | |
| | REEVTYLGYLLKGGKRWLTPARKATVMKIPTP | | |
| | TTPRQVREFLGTAGFCRLWIPGFASLAAPLYPLT | | |
| | REKVPFTWTEAHQEAFGRIKEALLSAPALALPD | | |
| | LTKPFALYVDEKEGVARGVLTQTLGPWRRPVA | | |
| | YLSKKLDPVASGWPTCLKAIAAVALLLKDADK | | |
| | LTLGQNVLVIAPHNLESIVRQPPDRWMTNARM | | |
| | THYQSLLLNERVSFAPPAILNPATLLPVESDDTPI | | |
| | HICSEILAEETGTRPDLRDQPLPGVPAWYTDGSS | | |
| | FIMDGRRQAGAAIVDNKRTVWASNLPEGTSAQ | | |
| | KAELIALTQALRLAEGKSINIYTDSRYAFATAHV | | |
| | HGAIYKQRGLLTSAGKDIKNKEEILALLEAIHLP | | |
| | KRVAIIHCPGHQRGTDPVATGNRKADEAAKQA | | |
| | AQSTRILTETTKNQEHF | | |
| 8302 | VLNLEEEYRLHEKPVPSFVDPSWLQLFPTVWAE | ALV83309.1 | Gibbon ape |
| | RTGMGLANQVPPVVVELKSGASPVAVRQYPMS | | leukemia virus |
| | KEAREGIRPHIQKFLDLGVLVPCQSPWNTPLLPV | | |
| | KKPGTNDYRPVQDLREINKRVQDIHPTVPNPYN | | |
| | LLSSLPPSHIWYSVLDLKDAFFCLRLHPNSQPLF | | |
| | AFEWRDPEKGNTGQLTWTRLPQGFKNSPTLFD | | |
| | EALHRDLAPFRALNPQVVLLQYVDDLLVAAPT | | |
| | YEDCKEGTQKLLQELSKLGYRVSAKKAQLCQK | | |
| | EVTYLGYLLKEGKRWLTPARKATVMKIPAPTTP | | |
| | RQVREFLGTAGFCRLWIPGFASLAAPLYPLTKES | | |
| | FPFVWTEEHQKAFDHIKEALLSAPALALPDLTK | | |
| | PFTLYVDERAGMARGVLTQTLGPWRRPVAYLS | | |
| | KKLDPVASGWPTCLKAVAAVALLLKDADKLTL | | |
| | GQKVTVIASHSLESIVRQPPDRWMTNARMTHY | | |
| | QSLLLNERVSFAPPAVLNPATLLPVESEATPVHR | | |
| | CSEILAEETGTRRDLKDQPLPGVSAWYTDGSSFI | | |
| | VEGKRRAGAAIVDGKRTVWASSLPEGTSAQKA | | |
| | ELVALTQALRLAKGRNINIYTDSRYAFATAHIH | | |
| | GAIYKQRGLLTSAGKDIKNKEEILALLEAIHLPK | | |
| | QVAIIHCPGHQRGNNPVATGNRRADEAAKQAA | | |
| | LSTRVLAEITKLQEP | | |
| 8303 | VLNLEEEYRLHEKPVPSFVDPSWLQLFPTVWAE | ALV83306.1 | Gibbon ape |
| | RAGMGLANQVPPVVVELKSGASPVAVRQYPMS | | leukemia virus |
| | KEAREGIRPHIQKFLDLGVLVPCQSPWNTPLLPV | | |
| | KKPGTNDYRPVQDLREINKRVQDIHPTVPNPYN | | |
| | LLSSLPPSHIWYSVLDLKDAFFCLRLHPNSQPLF | | |
| | AFEWRDPEKGNTGQLTWTRLPQGFKNSPTLFD | | |
| | EALHRDLAPFRVLNPQVVLLQYVDDLLVAAPT | | |
| | YEDCKEGTQKLLQELSKLGYRVSAKKAQLCQK | | |
| | EVTYLGYLLKEGKRWLTPARKATVMKIPAPTTP | | |
| | RQVREFLGTAGFCRLWIPGFASLAAPLYPLTKES | | |
| | FPFVWTEEHQKAFDHIKEALLSAPALALPDLTK | | |
| | PFTLYVDERAGMARGVLTQTLGPWRRPVAYLS | | |
| | KKLDPVASGWPTCLKAVAAVALLLKDADKLTL | | |
| | GQKVTVIASHSLESIVRQPPDRWMTNARMTHY | | |
| | QSLLLNERVSFAPPAVLNPATLLPVESEATPVHR | | |
| | CSEILAEETGTRRDLKDQPLPGVSAWYTDGSSFI | | |
| | AEGKRRAGAAIVDGKRTVWASSLPEGTSAQKA | | |
| | ELVALTQALRLAKGRNINIYTDSRYAFATAHIH | | |
| | GAIYKQRGLLTSAGKDIKNKEEILALLEAIHLPK | | |
| | QVAIIHCPGHQRGSNPVATGNRRADEAAKQAA | | |
| | LSTRVLAETTKPQEP | | |
| 8304 | VLNLEEEYRLHEKPVPSSIDPSWLQLFPTVWAE | P21414 | Gibbon ape |
| | RAGMGLANQVPPVVVELRSGASPVAVRQYPMS | | leukemia virus |
| | KEAREGIRPHIQKFLDLGVLVPCRSPWNTPLLPV | | |
| | KKPGTNDYRPVQDLREINKRVQDIHPTVPNPYN | | |
| | LLSSLPPSYTWYSVLDLKDAFFCLRLHPNSQPLF | | |
| | AFEWKDPEKGNTGQLTWTRLPQGFKNSPTLFD | | |
| | EALHRDLAPFRALNPQVVLLQYVDDLLVAAPT | | |
| | YEDCKKGTQKLLQELSKLGYRVSAKKAQLCQR | | |
| | EVTYLGYLLKEGKRWLTPARKATVMKIPVPTTP | | |
| | RQVREFLGTAGFCRLWIPGFASLAAPLYPLTKES | | |
| | IPFIWTEEHQQAFDHIKKALLSAPALALPDLTKP | | |
| | FTLYIDERAGVARGVLTQTLGPWRRPVAYLSK | | |
| | KLDPVASGWPTCLKAVAAVALLLKDADKLTLG | | |
| | QNVTVIASHSLESIVRQPPDRWMTNARMTHYQ | | |
| | SLLLNERVSFAPPAVLNPATLLPVESEATPVHRC | | |
| | SEILAEETGTRRDLEDQPLPGVPTWYTDGSSFIT | | |
| | EGKRRAGAPIVDGKRTVWASSLPEGTSAQKAE | | |
| | LVALTQALRLAEGKNINIYTDSRYAFATAHIHG | | |
| | AIYKQRGLLTSAGKDIKNKEEILALLEAIHLPRR | | |
| | VAIIHCPGHQRGSNPVATGNRRADEAAKQAALS | | |
| | TRVLAGTTKPQEPI | | |
| 8305 | VLSLEEEYRLHEKPVPTSIDPSWLQLFPTVWAER | O70652 | Gibbon ape |
| | AGMGLANRVPPVVVELKSGASPVAVRQYPMSK | | leukemia virus |
| | EAREGIRPHIQRFLDLGVLVPCRSPWNTPLLPVK | | |
| | KPGTNDYRPVQDLREINKRVQDIHPTVPNPYNL | | |
| | LSSLPPSHTWYSVLDLKDAFFCLKLHPNSQSLFA | | |
| | FEWKDPEKGNTGQLTWTRLPQGFKNSPTLFDE | | |
| | ALHRDLALFRAHNPQVKLLQYVDDLLVAAPTY | | |
| | QDCKEGTQKLLQELSKLGYRVSAKKAQLCQKE | | |
| | VTYLGYLLKEGKRWLTPARKATVMKIPAPTTP | | |
| | RQVREFLGTAGFCRLWIPGFASMAAPLYPLTKE | | |
| | SIPFIWTEEHQKAFDLIKKALLSAPALALPDLTK | | |
| | PFTLYVDERAGVARGVLTQTLGPWRRPVAYLS | | |
| | KKLDPVASGWPTCLKAVAAVALLLKDADKLTL | | |
| | GQNVTVIASHSLESIVRQPPDRWMTNARMTHY | | |
| | QSLLLNERVSFAPPAVLNPATLLPVESEATPVHR | | |
| | CSEILAEETGTRQDLKDQPLPGVPTWYTDGSSFI | | |
| | AEGKRKAGAAIVDGKRTVWASSLPEGTSAQKA | | |
| | ELVALTQALRLAEGRNINIYTDSRYAFATAHIH | | |
| | GAIYKQRGLLTSAGKDIKNKEEILALLEAIHLPK | | |
| | RVAIIHCPGHQKGNDPVATGNRRADEAAKQAA | | |
| | LSTRVLAETTKPQEP | | |
| 8306 | VLGLEEEYRLHEKPVPSSVDPSWLQLFPDVWAE | QDA02050.1 | Flying-fox |
| | KGGMGLANRVPPIVVELKSDALPVAVRQYPMS | | retrovirus |
| | REAREGIRPHIQRFLDLGVLVPCQSPWNTPLLPV | | |
| | KKPGTSDYRPVQDLREINKRVQDIHPTVPNPYN | | |
| | LLSSLPPNHTWYSVLDLKDAFFCLKLHPNSQLL | | |
| | FAFEWRDPEKGHTGQLTWTRLPQGFKNSPTLFD | | |
| | EALHRDLASFRASNPQVVLLQYVDDLLVAAPT | | |
| | YKDCKEGTQKLLQELSELGYRVSAKKAQLCQR | | |
| | EVTYLGYLLKEGKRWLTPARKATVMEIPTPTTP | | |
| | RQVREFLGTAGFCRLWIPGFASLAAPLYPLTKES | | |
| | TPFLWTEEHRRAFDQIKEALLTAPALALPDLTKP | | |
| | FALYVDERAGVARGVLTQTLGPWRRPVAYLSK | | |
| | KLDPVASGWPTCLKAVAAVALLLKDADKLTLG | | |
| | QSVTVIASHSLESIVRQPPDRWMTNARMTHYQS | | |
| | LLLNERVSFAPPAVLNPATLLPAESGAAPVHECS | | |
| | EILAEETGTRQDLTDQPLPGVPAWYTDGSSFITE | | |
| | GKRRAGAAIVDGKRTVWMSSLPEGTSAQKAEL | | |
| | IALTQALRLADGKDINIYTDSRYAFATAHIHGAI | | |
| | YRQRGLLTSAGKEIKNKEEILALLEAIHLPKRVA | | |
| | IIHCPGHQKGNDPVAIGNRRADEAAKQAALAV | | |
| | RVLAETIEPQGQ | | |
| 8307 | VLNLEEEYRLHEKPAPPSIDPFWLQLFPNVWAE | QJT93247.1 | Hervey pteropid |
| | QGGMGLANQVPPVVVELKSDASPVAVRQYPM | | gammaretrovirus |
| | SKEAREGIRPHIQRFLDLGVLVPCQSPWNTPLLP | | |
| | VKKPGTNDYRPVQDLREINKRVQDIHPTVPNPY | | |
| | NLLSSLPPSHTWYSVLDLKDAFFCLKLHPNSQL | | |
| | LFAFEWRDPEKGHTGQLTWTRLPQGFKNSPTLF | | |
| | DEALHRDLASFRASNPQVILLQYVDDLLVAAPT | | |
| | YEDCKEGTQKLLQELSELGYRVSAKKAQLCQK | | |
| | EVTYLGYLLKEGKRWLTPARKATVMRIPTPITP | | |
| | RQVREFLGTAGFCRLWIPGFASLAAPLYPLTKES | | |
| | VPFLWTEEHQRAFDHIKEALLTAPALALPDLTK | | |
| | PFALYVDEKAGVARGVLTQTLGPWRRPVAYLS | | |
| | KKLDPVASGWPTCLKAVAAVALLLKDADKLTL | | |
| | GQNVTVIASHSLESIVRQPPDRWMTNARMTHY | | |
| | QSLLLNERVSFAPPAVLNPATLLPAESEAALVH | | |
| | DCSEILAEETGTRQDLTDQPLPGVPAWYTDGSS | | |
| | FIAEGKRRAGAAIVDNKRTVWMSSLPEGTSAQ | | |
| | KAELIALTQALRLADGKDINIYTDSRYAFATAHI | | |
| | HGAIYRQRGLLTSAGKEIKNKEEILALLEAIHLP | | |
| | RRVAIVHCPGHQKGNDPIALGNRRADEAAKQA | | |
| | ALSVRVLAETTGPQGP | | |
| 8308 | VLNLEEEYRLHEKPVPSSIDPLWLQLFPNVWAE | QJT93250.1 | Macroglossus |
| | KGGMGLASQVPPVVVELKSDASPVAVRQYPMS | | minimus |
| | REAQEGIRPHIQRFLDLGVLVPCQSPWNTPLLPV | | gammaretrovirus |
| | KKPGTNDYRPVQDLREVNKRVQDIHPTVPNPY | | |
| | NLLSSLPPSHTWYTVLDLKDAFFCLKLHPNSQP | | |
| | LFAFEWRDPEKGHTGQLTWTRLPQGFKNSPTLF | | |
| | DEALHRDLASFRASNPQVVLLQYVDDLLVAAP | | |
| | TYEDCKEGTQKLLQELSNLGYRVSAKKAQLCQ | | |
| | KEVTYLGYLLKEGQRWLTPARKATVMGIPTPT | | |
| | TPRQVREFLGTAGFCRLWIPGFASLAAPLYPLTK | | |
| | ESTPFLWTEEHQKAFDCIKEALLTAPALALPDLT | | |
| | KPFALYVDERDGVARGVLTQTLGPWRRPVAYL | | |
| | SKKLDPVASGWPTCLKAVAAVALLLKDADKLT | | |
| | LGQNVTVIASHSLESIVRQPPDRWMTNARMTH | | |
| | YQSLLLNERVSFAPPAVLNPATLLPAESEAAPV | | |
| | HTCSEILAEETGTRKDLTDQPLPGVPAWYTDGS | | |
| | SFITEGKRRAGAAIVDSKRTVWMSSLPEGTSAQ | | |
| | KAELIALTQALRLANGRDINIYTDSRYAFATAHI | | |
| | HGAIYRQRGLLTSAGKEIKNREEILALLEAIHLP | | |
| | RRVAIIHCPGHQKGNDPVAVGNRRADEAAKQA | | |
| | ALSVQVLAEITKPQEL | | |
| 8309 | TLPLAEEYLLYEGPHDTGDRWLEKWKDELPGV | AGV92853.1 | Galidia ERV |
| | WAETNPPGLAKDRPPIHVQLMSTAQPIRVRQYP | | |
| | MTLEARRGVRENIRKLRAAGILVPCHSPWNTPL | | |
| | LPVRKAETGQYRMVQDLREVNKRVETIHPTVP | | |
| | NPYTLLSLLPPDHIWYSVLDLKDAFFCLPLAPGS | | |
| | QPLFAFEWSDPEEGESGQLTWTRLPQGFKNSPT | | |
| | LFDEALSHDLQSYRTGHPEVTLLQYMDDLIVAA | | |
| | RSEAECAQATRDLLETLGDQGYRVSAKKAQLC | | |
| | SQQVTYLGFRLKGGTRTLTESRIKAIVQIPSPKT | | |
| | KRQVREFLGTVGYCRLWIPGFAELAKPLHAVA | | |
| | GGGARPLTWTKTEEEAFQALKSALLQAPALSLP | | |
| | DLEKPFQLFVAENKGVAKGVLTQRIGPWKRPV | | |
| | AYLSRKLDPVAAGWPGCLRAIAAAALLVKEAS | | |
| | KLTFGQNLEVTSAHNLESLLRSPPDRWMTNTRV | | |
| | TQYQVLLLDPPRVSFRQTAALNPATLLPEADES | | |
| | LPFHQCEDTLDALTTLRPDLTDRPLLDAEVTLFT | | |
| | DGSSFVDQGXRHAGAAIVTLDSTIWAEALPKGT | | |
| | SAQRAELIALTKALLWGEDKRVNIYTDSRYAFA | | |
| | TLHVHGALYKERGLLTTGGKEIKNAPEILALLSS | | |
| | VWKPKKVAVIHCRGHQKNDTNIARGNQRADR | | |
| | VAKEVARGEIAPVLTLQEPNPV | | |
| 8310 | SSPLVEEYRLFVEQPAQNLALLDLWREDIPEVW | AGV92856.1 | Echidna ERV |
| | AESNPPGLATTQVPVHVQLTSTALPIRIRQYPISL | | Duck infectious |
| | EARRSLRGSIRKFKAAGILKPVHSPWNTPLLPVR | | |
| | KTGTSEYRMVQDLREVNKRVETIHPTVPNPYTL | | |
| | LSLLPPDRTWYSVLDLKDAFFCIPLTCQSQLLFA | | |
| | FEWIDIEEGESGQLTWTRLPQGFKNSPTLFDEAL | | |
| | SRDLQGYRFDHPTVTLLQYVDDLLIAARSRDEC | | |
| | LQATRDLLVTLGSMGYRVSGSKAQLCQEEVTY | | |
| | LGFRIKDGTRTLAQSRVQAILQIPAPKTKKQVRE | | |
| | FLGTVGYCRLWIPSFAELAQPLYAATRGADAPL | | |
| | RWTGTEEEAFQRLKTALLQPPALALPNLDKPFQ | | |
| | LFVDEAKGVAKGVLMQTLGPWKRPVAYLSRK | | |
| | LDPLAAGWPRCLRAIAAAALLSKEASKLTFEQS | | |
| | LEITSSHNLEGLLRTPPDKWLTNARVTQYQVLL | | |
| | LDPPRVIFKQTAALNPATLLPATDDSLPLHHCA | | |
| | DTLDALTTTRPDLTDQPLADAEATLFTDGSSYV | | |
| | KKAEYAGAAVVTTNSIVWAEALPRGTSAQRAE | | |
| | LIALTKALEWSRDKTVNIYTDSRYAFATLHVHA | | |
| | MIYKERGLLTAGGKAIKNASEILALLTAIWLPKR | | |
| | VAVIHCRGHQQGESLEALGNRLADKTAREVAK | | |
| | KSPAIQASLCDPPRTP | | |
| 8311 | TAPLEEEYRLFLEAPIQNVTLLEQWKREIPKVW | AGV92859.1 | anemia virus] |
| | AEINPPGLASTQAPIHVQLLSTALPVRVRQYPITL | | |
| | EARRSLRETIRKFRAAGILRPVHSPWNTPLLPVR | | |
| | KPGTSEYRMVQDLREVNKRVETIHPTVPNPYTL | | |
| | LSLLPPDRTWYSVLDLKDAFFCIPLAPESQLIFAF | | |
| | EWTDAEEGESGQLTWTRLPQGFKNSPTLFDEAL | | |
| | NRDLQGFRLDHPSVSLLQYVDDLLIAADTQAAC | | |
| | LSATRDLLMTLAELGYRVSGKKAQLCQEEVTY | | |
| | LGFKIHKGSRTLSNSRTQAILQIPVPKTKRQVRE | | |
| | FLGTIGYCRLWIPGFAELAQPLYAATRGGNDPL | | |
| | EWGEKEEEAFQSLKLALTQPPALALPSLDKPFQ | | |
| | LFIEETGGAAKGVLTQTLGPWKRPVAYLSKRLD | | |
| | PVAAGWPRCLRAIAAAALLTREASKLTFGQDIEI | | |
| | TSSHNLESLLRSPPDRWLTNARITQYQVLLLDPP | | |
| | RVRFKQTAALNPATLLPETDDTLPIHHCLDTLDS | | |
| | LTSTRPDLTDQPLAQAEATLFTDGSSYIRDGKR | | |
| | YAGAAVVTLDSVVWAEPLPIGTSAQKAELIALT | | |
| | KALEWSKDKSVNIYTDSRYAFATLHVHGMIYK | | |
| | ERGLLTAGGKAIXNAPEILALLTAVWLPKRVAV | | |
| | MHCRGHQKDDAPTSAGNRRADEVAREVAIRPL | | |
| | SVQATVSDAPDMP | | |
| 8312 | TAPLEEEYRLFLEAPIQNVTLLEQWKREIPKVW | AHC55379.1 | Reticulo |
| | AEINPPGLASTQAPIHVQLLSTALPVRVRQYPITL | | endotheliosis |
| | EARRSLRETIRKFRAAGILRPVHSPWNTPLLPVR | | virus |
| | KPGTSEYRMVQDLREVNKRVETIHPTVPNPYTL | | |
| | LSLLPPDRTWYSVLDLKDAFFCIPLAPKSQLIFA | | |
| | FEWTDAEEGESGQLTWTRLPQGFKNSPTLFDEA | | |
| | LNRDLQGFRLEHPSVSLLQYVDDLLIAADTQAA | | |
| | CLSATRDLLMTLAELGYRVSGKKAQLCQEEVT | | |
| | YLGFKIHKGSRTLSNSRTQAILQIPVPKTKRQVR | | |
| | EFLGTIGYCRLWIPGFAELAQPLYAATRGGNDP | | |
| | LEWGEKEEEAFQSLKLALTQPPALALPSLDKPF | | |
| | QLFIEETGGAAKGVLTQALGPWKRPVAYLSKR | | |
| | LDPVAAGWPRCLRAIAAAALLTREASKLTFGQ | | |
| | DIEITSSHNLESLLRSPPDRWLTNARITQYQVLLL | | |
| | DPPRVRFKQTAALNPATLLPETDDTLPIHHCLDT | | |
| | LDSLTSTRPDLTDQPLAQAEATLFTDGSSYIRDG | | |
| | KRYAGAAVVTLDSVIWAEPLPIGTSAQKAELIA | | |
| | LTKALEWSKDKSVNIYTDSRYAFATLHVHGMI | | |
| | YKERGLLTAGGKAIKNAPEILALLTAVWLPKRV | | |
| | AVMHCRGHQKDDAPTSAGNRRADEVAREVAI | | |
| | RPLSIQATVSDAPDMP | | |
| 8313 | TAPLEEEYRLFLEAPIQNVTLLEQWKREIPKVW | ASH96780.1 | Reticulo |
| | AEINPPGLASTQAPIHVQLLSTALPVRVRQYPITL | | endotheliosis |
| | EARRSLRETIRKFRAAGILRPVHSPWNTPLLPVR | | virus |
| | KPGTSEYRMVQDLREVNKRVETIHPTVPNPYTL | | |
| | LSLLPPDRTWYSVLDLKDAFFCIPLAPKSPLIFAF | | |
| | EWTDAEEGESGQLTWTRLPQGFKNSPTLFDEAL | | |
| | NRDLQGFRLDHPSVSLLQYVDDLLIAADTQAAC | | |
| | LSATRDLLMTLAELGYRVSGKKAQLCQEEVTY | | |
| | LGFKIHKGSRTLSNSRIQAILQIPVPKTKRQVREF | | |
| | LGTIGYCRLWIPGFAELAQPLYAATRGGNDPLE | | |
| | WGEKEEEAFQSLKLALTQPPALALPSLDKPFQL | | |
| | FIEETGGAAKGVLTQALGPWKRPVAYLSKRLDP | | |
| | VAAGWPRCLRAIAAAALLTREASKLTFGQDIEI | | |
| | TSSHNLESLLRSPPDRWLTNARITQYQVLLLDPP | | |
| | RVRFKQTAALNPATLLPETDDTLPIHHCLDTLDS | | |
| | LTSTRPDLTDQPLAQAEATLFTDGSSYIPHGKRY | | |
| | AGAAVVTLDSVIWAEPLPIGTSAQKAELIALTK | | |
| | ALEWSKDKSVNIYTDSRYAFATLHVHGMIYKE | | |
| | RGLLTAEGKAIKNAPEILALLTAVWLPKRVAV | | |
| | MHCRGHQKDDAPTSAGNRRADEVAREVAIRPL | | |
| | SIQATVFDAPDMP | | |
| 8314 | TAPLEEEYRLFLEAPIQNVTLLEQWKREIPKVW | P03360 | Reticulo |
| | AEINPPGLASTQAPIHVQLLSTALPVRVRQYPITL | | endotheliosis |
| | EAKRSLRETIRKFRAAGILRPVHSPWNTPLLPVR | | virus |
| | KSGTSEYRMVQDLREVNKRVETIHPTVPNPYTL | | |
| | LSLLPPDRIWYSVLDLKDAFFCIPLAPESQLIFAF | | |
| | EWADAEEGESGQLTWTRLPQGFKNSPTLFDEA | | |
| | LNRDLQGFRLDHPSVSLLQYVDDLLIAADTQAA | | |
| | CLSATRDLLMTLAELGYRVSGKKAQLCQEEVT | | |
| | YLGFKIHKGSRSLSNSRTQAILQIPVPKTKRQVR | | |
| | EFLGTIGYCRLWIPGFAELAQPLYAATRGGNDP | | |
| | LVWGEKEEEAFQSLKLALTQPPALALPSLDKPF | | |
| | QLFVEETSGAAKGVLTQALGPWKRPVAYLSKR | | |
| | LDPVAAGWPRCLRAIAAAALLTREASKLTFGQ | | |
| | DIEITSSHNLESLLRSPPDKWLTNARITQYQVLL | | |
| | LDPPRVRFKQTAALNPATLLPETDDTLPIHHCLD | | |
| | TLDSLTSTRPDLTDQPLAQAEATLFTDGSSYIRD | | |
| | GKRYAGAAVVTLDSVIWAEPLPIGTSAQKAELI | | |
| | ALTKALEWSKDKSVNIYTDSRYAFATLHVHGM | | |
| | IYRERGLLTAGGKAIKNAPEILALLTAVWLPKR | | |
| | VAVMHCKGHQKDDAPTSTGNRRADEVAREVA | | |
| | IRPLSTQATISDAPDMP | | |
| 8315 | TAPLEEEYRLFLEAPIQNVTLLEQWKREIPKVW | ACJ65653.1 | Reticulo |
| | AEINPPGLASTQAPIHVQLLSTALPVRVRQYPITL | | endotheliosis |
| | EAKRSLRETIRKFRAAGILRPVHSPWNTPLLPVR | | virus] |
| | KSGTSEYRMVQDLREVNKRVETIHPTVPNPYTL | | |
| | LSLLPPDRIWYSVLDLKDAFFCIPLAPESQLIFAF | | |
| | EWADAEEGESGQLTWTRLPQGFKNSPTLFDEA | | |
| | LNRDLQGFRLDHPFVSLLQYVDDLLIAADTQAA | | |
| | CLSATRDLLMTLAELGYRVSGKKAQLCQEEVT | | |
| | YLGFKIHKGSRTLSNSRTQAILQIPVPKTKRQVR | | |
| | EFLGTIGYCRLWIPGFAELAQPLYAATRGGNDP | | |
| | LVWGEKEEGAFQSLKLALTQPPALALPSLDKPF | | |
| | QLFVEETGGAAKGVLTQALGPWKRPVAYLSKR | | |
| | LDPVAAGWPRCLRAIAAAALLTREASKLTFGQ | | |
| | DIEITSSHNLESLLRSPPDRWLTNARITQYQVLLL | | |
| | DPPRVRFKQTAALNPATLLPETDDTLPIHHCLDT | | |
| | LDSLTSTRPDLTDQPLAQAEATLFTDGSSYIRDG | | |
| | KRYTGAAVVTLDSVIWAEPLPIGTSAQKAELIA | | |
| | LTKALEWSKDKSVNIYTDSRYAFATLHVHGMI | | |
| | YRERGLLTAGGKAIKNAPEILALLTAVWLPKRV | | |
| | AVMHCKGHQKDDAPTSTGNRRADEVAREVAIR | | |
| | PLSTQATISDAPDMP | | |
| 8316 | TAPLEEEYRLFLEAPIQNVTLLEQWKREIPKVW | ACT75574.1 | Reticulo |
| | AEINPPGLASTQAPIHVQLLSTALPVRVRQYPITL | | endotheliosis |
| | EAKRSLRETIRKFRAAGILRPVHSPWNTPLLPVR | | virus] |
| | KSGTSEYRMVQDLREVNKRVETIHPTVPNPYTL | | |
| | LSLLPPDRIWYSVLDLKDAFFCIPLAPESQLIFAF | | |
| | EWADAEEGESGQLTWTRLPQGFKNSPTLFDEA | | |
| | LNRDLQGFRLDHPFVSLLQYVDDLLIAADTQAA | | |
| | CLSATRDLLMTLAELGYRVSGKKAQLCQEEVT | | |
| | YLGFKIHKGSRTLSNSRTQAILQIPVPKTKRQVR | | |
| | EFLGTIGYCRLWIPGFAELAQPLYAATRGGNDP | | |
| | LVWGEKEEESFQSLKLALTQPPALALPSLDKPF | | |
| | QLFVEETGGAARGVLTQALGPWKRPVAYLSKR | | |
| | LDPVAAGWPRCLRAIAAAALLTREASKLTFGQ | | |
| | DIEITSSHNLESLLRSPPDRWLTNARITQYQVLLL | | |
| | DPPRVRFKQTAALNPATLLPETDDTLPIHHCLDT | | |
| | LDSLTSTRPDLTDQPLAQAEATLFTDGSSYIRDG | | |
| | KRYTGAAVVTLDSVIWAGPLPIGTSAQKAELIA | | |
| | LTKALEWSKDKSVNIYTDSRYAFATLHVHGMI | | |
| | YRERGLLTAGGKAIKNAPEILALLTAVWLPKRV | | |
| | AVMHCKGHQKGDAPTSTGNRRADEVAREVAIR | | |
| | PLSTQATISDAPDMP | | |
| 8317 | TAPLEEEYRLFLEAPIQNVTLLEQWKREIPKVW | AUS82407.1 | Reticulo |
| | AEIIPPGLASTQAPIHVQLLSTALPVRVRQYPITL | | endotheliosis |
| | EAKRSLRETIRKFRAAGILRPVHSPWNTPLLPVR | | virus] |
| | KSGTSEYRMVQDLREVNKRVETIHPTVPNPYTL | | |
| | LSLLPPDRIWYSVLDLKDAFFCIPLAPESQLIFAF | | |
| | EWADAEEGESGQLTWTRLPQGFKNSPTLFDEA | | |
| | LNRDLQGFRLDHPFVSLLQYVDDLLIAADTQAA | | |
| | CLSATRDLLMTLAELGYRVSGKKAQLCQEEVT | | |
| | YLGFKIHKGSRTLSNSRTQAILQIPVPKTKRQVR | | |
| | EFLGTIGYCRLWIPGFAELAQPLYAATRGGNDP | | |
| | LVWGEKEEEALQSLKLALTQPPALALPSLDKPF | | |
| | QLFVEETGGAAKGVLTQALGPWKRPVAYLSKR | | |
| | LDPVAAGWPRCLRAIAAAALLTREASKLTFGQ | | |
| | DIEITSSHNLESLLRSPPDRWLTNARITQYQVLLL | | |
| | DPPRVRFKQTAALNPATLLPETDDTLPIHHCLDT | | |
| | LDSLTSTRHDLTDQPLAQAEATLFTDGSSYIRDG | | |
| | KRYTGAAVVTLGSVIWAEPLPIGTSAQKAELIA | | |
| | LTKALEWSKDKSVNIYTDSRYAFATLHVHGMI | | |
| | YRERGLLTAGGKAIKNAPEILALLTAVWLPKRV | | |
| | AVMHCKGHQKDDAPTSTGNRRADEVAREVAIR | | |
| | PLSTQATISDAPDMP | | |
| 8318 | TTLVPLQDYQERLLKQTAFPEQHRKRLQTLFLK | AXY87475 | Simian foamy |
| | YDALWQHWENQVGHRRIKPHHIATGTVAPRPQ | | virus |
| | KQYPINPKAKPSIQIVINDLLKQGVLIQQNSTMN | | |
| | TPVYPVPKPDGKWRMVLDYREVNKTIPLIAAQ | | |
| | NQHSAGILSSIYRGKYKTTLDLSNGFWAHSITPE | | |
| | SYWLTAFTWQGKQYCWTRLPQGFLNSPALFTA | | |
| | DVVDLLKEIPNVQAYVDDIYISHDDPEEHLEQL | | |
| | EKVFSILLNAGYVVSLKKSEIAQYEVEFLGFNIT | | |
| | KEGRGLTETFKQKLLNITPPKDLKQLQSILGLLN | | |
| | FARNFIINFSELVKPLYSIISNAQGKYITWTEENS | | |
| | NQLQHIIDVLNMAENLEERNPETRLIVKVNASPS | | |
| | AGYIRFYNEHSKRPIMYINYVFTKAEIKFTPTEK | | |
| | LLTTIHKALIKALDIAMGQEILVYSPITSMTKIQK | | |
| | TPLPERKALPIRWITWMTYLEDPRIFFHYDKTLP | | |
| | ELQQIPAVTEDVVYKTKHPSEFQRVFYTDGSAI | | |
| | KHPDITKSHSAGMGIAETQFSPEFKVLNKWSIPL | | |
| | GDHTAQLAEIAAEEFACKKALKITGPVLIVTDSF | | |
| | YVAESANKELPYWQSNGFLNNKKKPLKHVSK | | |
| | WKSIAECLQLKPDITIIHEKGHQPTATSFHTEGN | | |
| | SLADKLATQGSYVVNTNTTPSLDAELDQLLQG | | |
| | QYPKGYPKHYSYKLQEGHVVVERPNGIRIIPPK | | |
| | ADRSTIILQAHNIAHTGRDSTFLKVTSKYWWPN | | |
| | LRKDVVKVIRQCKQCLVTNQAVLTAPPILRPE | | |
| 8319 | TVLVPLQDYQERLLKQTTLPKEQKDQLEKLFLK | YP_0095132 | Rhesus macaque |
| | YDALWQHWENQVGHRRIKPHNIATGTLAPRPQ | 42 | simian foamy |
| | KQYPINPKAKPSIQIVIDDLLKQGVLIQQNSTMN | | virus |
| | TPVYPVPKPDGKWRMVLDYREVNKTIPLIAAQ | | |
| | NQHSAGILSSIYRGKYKTTLDLTNGFWAHPITPE | | |
| | SYWLTAFTWQGKQYCWTRLPQGFLNSPALFTA | | |
| | DVVDLLKEVPNVQAYVDDIYMSHDDPQEHLEQ | | |
| | LEKVFSILLNAGYVVSLKKSEIAQREVEFLGFNI | | |
| | TKEGRGLTETFKQKLLNVIPPKDLKQLQSILGLL | | |
| | NFARNFIPNYSELVKPLYTIVANANGKFISWTEE | | |
| | NSNQLQYIISVLNQADNLEERNPETRLILKVNSS | | |
| | PSAGYIRYYNEGSKRPIMYVNYVFSKAEVKFTQ | | |
| | TEKMLTTMHKGLIKAMDLAMGQEILVYSPIVS | | |
| | MTKIQKTPLPERKALPVRWITWMTYLEDPRIQF | | |
| | HYDKTLPELQQTPSVTEDVIAKTKHPSEFAMVF | | |
| | YTDGSAIKHPDINKSHSAGMGIAQVQFQPEYKV | | |
| | IHQWSIPLGDHTAQLAEIAAVEFACKKALKISGP | | |
| | VLIVTDSFYVAESANKELSYWKSNGFLNNKKKP | | |
| | LKHVSKWKSIAECLQLKPDITIIHEKGHQQPMTT | | |
| | LHTEGNNLADKLATQGSYVVHCNTTPSLDAEL | | |
| | DQLLQGHNPPGYPKQYKYTLEDNKIIVERPNGQ | | |
| | RIVPPKSDREKIISMAHNIAHTGRDATFLKVSSK | | |
| | YWWPNLRKDVVKVIRQCKQCLVTNAANLTSPP | | |
| | ILRPE | | |
| 8320 | TILVPLQDYQSRILEKTALSEEFKKQLQTLFLKY | YP_0095085 | Western lowland |
| | DNLWQHWENQVCHRKIRPHNIATGDYPPRPQK | 71 | gorilla simian |
| | QYPINPKARSSIQVVIDDLLKQGVLVQQNSTMN | | foamy virus |
| | TPVYPIPKPDGRWGMVLDYREVNKTIPLIAAQN | | |
| | QHSAGILATIVRKKYKTTLVLANGFWAHPITPES | | |
| | YWLTAFIWQGKQYCWTRLPQGFLNSPALFTAD | | |
| | VVDLLKEISNVQAYVDDIYLSHDDPQEHLDQLE | | |
| | KVFQILLQAGYVVSLKKSEVAQKTVEFLGFNIT | | |
| | KEGRGLTEAFKAKLLDITPPKDLKQLQSILGLLN | | |
| | FARNFILNFAELVKPLYSLISSAKGKYIEWSNEN | | |
| | TVQLQTIIKALNNADNLEERIPEKRLIIKVNTSPS | | |
| | AGYVRYYNETGKKPIMYLNYVFSKAELKFTLL | | |
| | EKLLTTMHKALIKAMDLAMGQEILVYSPVVSM | | |
| | TKIQKTPIPERKALPIRWITWMTYLEDPRIQFHY | | |
| | DKTLPELKNIPDVLTENSSKIMIHPSQYNSVFYT | | |
| | DGSAIRSPDPTKSHNAGMGIVQVKFSPELQVINQ | | |
| | WSIPLGNHTAQMAEIAAVEFACKKALKITGPVL | | |
| | IITDSFYVAESTNKELPYWKSNGFVNNKKKPLK | | |
| | HVSKWKSIAECLSLKPDITIQHERGHQPIYTSIHT | | |
| | EGNALADKLATQGSYVVNNNDKKPNLDAELD | | |
| | HLIQGKYPKGYPKQYTYYMEDGKVKVNRPEGT | | |
| | KIIPPSLERAGIVQKAHNLAHTGREATLLKIANL | | |
| | YWWPNMRKDVVRQLGRCQQCLVTNAFNQTSG | | |
| | PILRPT | | |
| 8321 | TILVPLQEYQEKILSKTALPEDQKQQLKTLFVKY | YP_0095085 | Eastern |
| | DNLWQHWENQVGHRKIRPHNIATGDYPPRPQK | 51 | chimpanzee |
| | QYPINPKAKPSIQIVIDDLLKQGVLTPQNSTMNT | | simian foamy |
| | PVYPVPKPDGRWRMVLDYREVNKTIPLTAAQN | | virus |
| | QHSAGILATIVRQKYKTTLDLANGFWAHPITPES | | |
| | YWLTAFTWQGKQYCWTRLPQGFLNSPALFTAD | | |
| | VVDLLKEIPNVQVYVDDIYLSHDDPKEHVQQLE | | |
| | KVFQILLQAGYVVSLKKSEIGQKTVEFLGFNITK | | |
| | EGRGLTDTFKTKLLNITPPKDLKQLQSILGLLNF | | |
| | ARNFIPNFAELVQPLYNLIASAKGKYIEWSEENT | | |
| | KQLNMVIEALNTASNLEERLPEQRLVIKVNTSPS | | |
| | AGYVRYYNETGKKPIMYLNYVFSKAELKFSML | | |
| | EKLLTTMHKALIKAMDLAMGQEILVYSPIVSMT | | |
| | KIQKTPLPERKALPIRWITWMTYLEDPRIQFHYD | | |
| | KTLPELKHIPDVYTSSQSPVKHPSQYEGVFYTD | | |
| | GSAIKSPDPTKSNNAGMGIVHATYKPEYQVLNQ | | |
| | WSIPLGNHTAQMAEIAAVEFACKKALKIPGPVL | | |
| | VITDSFYVAESANKELPYWKSNGFVNNKKKPL | | |
| | KHISKWKSIAECLSMKPDITIQHEKGHQPTNTSI | | |
| | HTEGNALADKLATQGSYVVNCNTKKPNLDAEL | | |
| | DQLLQGHYIKGYPKQYTYFLEDGKVKVSRPEG | | |
| | VKIIPPQSDRQKIVLQAHNLAHTGREATLLKIAN | | |
| | LYWWPNMRKDVVKQLGRCQQCLITNASNKAS | | |
| | GPILRPD | | |
| 8322 | TIKLPVQDLKNTLVSQANIGKEDKIKLAKLLDK | YP_0095085 | Spider monkey |
| | YDDLWQQWDNQVGNRKITPHNIATGTYPPKPQ | 61 | simian foamy |
| | KQYHINPKAKPSIQIVINDLLKQGVLRQSTSPMN | | virus |
| | TPVYPVPKPDGKWRMVLDYRAVNKTIPLIAAQ | | |
| | NQHSLGILTNLIRHKYKSTIDLSNGFWAHPITED | | |
| | SQWITAFTWEGKQHVWTRLPQGFLNSPALFTA | | |
| | DVVDILKEVPGVSVYVDDIYISSPTMEEHFQVL | | |
| | DSIFRKLLETGYIVSLKKSALARYEVNFLGFVISE | | |
| | TGRGLTSEFRERLQEITPPTTLKQLQSILGFLNFA | | |
| | RNFVPNFSELVQPLYQLISTASGNFIQWTAEHTL | | |
| | RLNELISALNHAGNLEQRRGDSPLVVKVNASDK | | |
| | TGYIRYYNDNSLIPIAYASHVESTAELKFTPLEK | | |
| | LLVTMHRALLKGIDLALGQPIKVYSPIASMQKL | | |
| | QKTPIPERKALSTRWVTWLSYLEDPRITFYYDK | | |
| | TLPDLKHVPASTDNNIITLLPITEYEAVFYTDGS | | |
| | AIKSPKTEQTHSAGMGIVMVVYTPEPNITQQWS | | |
| | IPLGDHTAQYAEISAVEFACKKASLLQGPVLIVT | | |
| | DSDYVARSANKELPFWRSNGFLNNKKKPLKHIS | | |
| | KWKNISDSLLLKRNITIVHEPGHQPSKTSIHTLG | | |
| | NSLADKLAVQGSYSVNTINKIPSLDAELNQILEG | | |
| | NLPKGYPKQYKYVLKNNELIVQRPEGDKIIPPK | | |
| | ADRLPLVKTAHELAHTGREATLLKLQTTHWWP | | |
| | NMRKDIITVLRQCKPCLQTDSTNLTPIPPVSQP | | |
| | TEKLPIQDYKDNIVKRADITKEEKGMLYKLLDK | | |
| | YDPLWQQWENQVGNRQITPHIIATGTINPKPQK | | |
| | QYHINPKAKPSIQIVINDLLKQGVLKQQNSIMNT | | |
| | PIYPVPKTEGKWRMVLDYRAVNKTIPLIAAQNQ | | |
| | HSAGILTNLVRQKYKSTIDLSNGFWAHPIDQDS | | |
| | QWITAFTWEGKQYVWTRLPQGFLNSPALFTAD | | |
| 8323 | VVDLLKEIPNVNVYVDDIYVSTETINQHFQVLD | YP_0095085 | Squirrel monkey |
| | KIFQKLLQAGYVVSLKKSNLCRYEVTFLGFTISK | 66 | simian foamy |
| | YGRGLTEEFQEKLRNISPPNSLKQLQSILGLLNF | | virus |
| | ARNFIPNFSELIKPLYELISTAQGQSISWEPKHSQ | | |
| | ALNNLIIALNHADNLEQRNGEVPLVIKINASNTT | | |
| | GYIRFYNKNGKRPIAYASHVFNHTEQKFTPVEK | | |
| | LLTTMHKAIIKGIDLAIGQPIEIYSPIVSMQKLQKI | | |
| | TLPERKALSTRWLSWLSYIEDPRFLFIYDKTLPD | | |
| | LKEMPPTQTDDYNPMLPLHQYLAVFYTDGSSIK | | |
| | SPDPTKTHSSGMGIVQAIYEPNFQIKHQWSIPLG | | |
| | DHTAQYAEIAAVEFACKKALQVTGPVLIVTDSD | | |
| | YVARSVNNELNFWRSNGFVNNKKKPLKHISKW | | |
| | KSISESLLLHKNITIVHEPGHQPSSTSVHTQGNAL | | |
| | ADKLAVQGSYTINNITIKPSLDTELRAVLEGKLP | | |
| | KGYPKNLKYEYNSPNLIVIRKEGQRIIPPLSDRPK | | |
| | LVKQAHELAHTGREATLLRLQNQYWWPKMRK | | |
| | DVSHCLRTCMPCLQTNSTNLTTTRPFQQI | | |
| 8324 | TIKIDIQKQQEQLLHTTNLSSEGKKYLKDLFIKY | NP_054716 | Equine foamy |
| | DNLWQKWENQVGHRRITPHKIATGTLNPKPQK | | virus |
| | QYRINPKAKADIQIVIDDLLKQGVLKQQTSPMN | | |
| | TPVYPVPKPDGRWRMVLDYRAVNKVTPAIATQ | | |
| | NCHSASLLNTLYRGQYKTTLDLANGFWAHPIQ | | |
| | ESDQWITSFTWNGKSYVWTTLPQGFLNSPALFT | | |
| | ADVVDLLKDIPNVEVYVDDVYFSNDTEEEHLK | | |
| | TMDLLFQKLQTAGYIVSLKKSKLGQHTVDFLGF | | |
| | QITQTGRGLTDSYKSKLLDITPPNTLKQLQSILG | | |
| | LLNFARNFIPNYSELITPLYQLIPLAKGIYIPWET | | |
| | KHTAILQKIIKELNASENLEQRKPDVELIVKVHV | | |
| | SPTAGYIKFANKGSIKPIAYHNVVFSKTELKFTIT | | |
| | EKVMTTIHKALLKAFDLAMGQPIWVYSPIHSMT | | |
| | RIQKTPLTERKALSIRWLKWQTYFEDPRLIFHYD | | |
| | DTLPDLQNLPQTTLGNEVDILPLSEYEVVFYTD | | |
| | GSSIKSPKKDKQHSAGMGIIAVRYQPQMNIIQE | | |
| | WSIPLGDHTAQFAEIAAFEFALKQAIRKMGPVLI | | |
| | VTDSDYVAKSYNQELDFWVSNGFVNNKKKPL | | |
| | KHVSKWKSIADCKKHKADIHVIHEPGHQNDLQ | | |
| | SPYAMGNNAADKLAVKASYTVFSVQTLPSLDA | | |
| | ELHQLLDKQTPNPKGYPSKYEYTLRDGQVYVK | | |
| | RTDGEKIIPSKDDRVKILELAHKGPGSGHLGKNT | | |
| | MYIKILNKYWWPNLIKDISKYIRTCTNCIITNTD | | |
| | NVPNKSYIVQE | | |
| 8325 | TIKIDVESQKHTLITESTLSPQGQMRLKKLLDQY | NP_044929 | Bovine foamy |
| | QALWQCWENQVGHRRIEPHKIATGALKPRPQK | | virus |
| | QYHINPRAKADIQIVIDDLLRQGVLRQQNSEMN | | |
| | TPVYPVPKADGRWRMVLDYREVNKVTPLVAT | | |
| | QNCHSASILNTLYRGPYKSTLDLANGFWAHPIK | | |
| | PEDYWITAFTWGGKTYCWTVLPQGFLNSPALF | | |
| | TADVVDILKDIPNVQVYVDDVYVSSATEQEHL | | |
| | DILETIFNRLSTAGYIVSLKKSKLAKETVEFLGFS | | |
| | ISQNGRGLTDSYKQKLMDLQPPTTLRQLQSILG | | |
| | LINFARNFLPNFAELVAPLYQLIPKAKGQCIPWT | | |
| | MDHTTQLKTIIQALNSTENLEERRPDVDLIMKV | | |
| | HISNTAGYIRFYNHGGQKPIAYNNALFTSTELKF | | |
| | TPTEKIMATIHKGLLKALDLSLGKEIHVYSAIAS | | |
| | MTKLQKTPLSERKALSIRWLKWQTYFEDPRIKF | | |
| | HHDATLPDLQNLPVPQQDTGKEMTILPLLHYEA | | |
| | IFYTDGSAIRSPKPNKTHSAGMGIIQAKFEPDFRI | | |
| | VHLWSFPLGDHTAQYAEIAAFEFAIRRATGIRGP | | |
| | VLIVTDSNYVAKSYNEELPYWESNGFVNNKKK | | |
| | TLKHISKWKAIAECKNLKADIHVIHEPGHQPAE | | |
| | ASPHAQGNALADKQAVSGSYKVFSNELKPSLD | | |
| | AELEQVLSTGRPNPQGYPNKYEYKLVNGLCYV | | |
| | DRRGEEGLKIIPPKADRVKLCQLAHDGPGSAHL | | |
| | GRSALLLKLQQKYWWPRMHIDASRIVLNCTVC | | |
| | AQTNSTNQKPRPPLVIP | | |
| 8326 | TIKLNLEEQQRTLLNNSILSKKGKEELKRLFEKY | QER92092 | Feline foamy |
| | NALWQSWENQVGHRKIRPHKIATGTVKPTPQK | | virus |
| | QYHINPKAKPDIQIVINDLLKQGVLIQKESTMNT | | |
| | PVYPVPKPNGHWRMVLNYRAVNKVTPLIAVQN | | |
| | QHSYGILGSLFKGKYKTTIDLSNGFWAHPIVPED | | |
| | YWITAFTWQGKQYCWTVLPQGFLNSPGLFTGD | | |
| | VVDLLQGIPNVEVYVDDVYISHDSEKEHLEYLE | | |
| | ILFNRLNEAGYIVSLKKSNIANSSVDFLGFQITNE | | |
| | GQGLTDTFKEKLENITAPTTLKQLQSILGLLNFA | | |
| | RNFIPDFTELIAPLYALIPKSTKNYVPWQIEHSTT | | |
| | LETLIAKLNEAKYLQGRRGDKTLIMKVNASYTT | | |
| | GYIRYYNEGEKKPISYVSIVFSKTELKFTKLEKL | | |
| | LTTVHKGLLKALDLSMGQNIHVYSPIVSMQNIQ | | |
| | KTPQTAKKALASRWLSWLSYLEDPRIRFFYDPQ | | |
| | MPALKDLPAVNIGENNKKHPSNFQHIFYTDGSA | | |
| | ITSPTKEGHLNAGMGIVYFINRDGNLQKQQEWS | | |
| | ISLGNHTAQFAKIAAFEFALKKCLPLGGNILVVT | | |
| | DSNYVAKAYNEELDVWASNGFVNNRKKPLKHI | | |
| | SKWKSVANFKKLRPNVVVTHEPGHQKLNSSPH | | |
| | AYGNNLADQLATQASFKVQHDKNSKLDTEQIK | | |
| | AIQARQNNERVPVGYPKQYTYELRNNKCMVLR | | |
| | KDGWREIPPSRERYKLIKEAHDISHASREAVLLK | | |
| | IQENYWWPKMKKDVSSFLSTCNVCKMVNPLNL | | |
| | KPISPQAIV | | |
| 8327 | DIEKLIQNQIDKTNINKDKLRELLLNKREILAKSL | XP_0078891 | Callorhinchus |
| | TDCGKVKSNAEIRGKLHHKQRQYKIRREDKETI | 23 | milii |
| | GKIINNLMEQGVIKKCRSPTNSPIFLKKKPDGSW | | |
| | RLLLDCKALNECTNPKQGQSISSHGSIEKLTREK | | |
| | YHTTLNIANGFWSIPIVEKDQFKTAFTYQGQQY | | |
| | QWTRLPEGWCNSTVIFNEAIRRVLDDNPKITRF | | |
| | GGVIHFSNDNAESHIKLLKQILEKLDNHGLKIDL | | |
| | RKSQIGRYAVDFLGHQISETEDRLSRKFKEEVSQ | | |
| | VKPPKTRKELQSVLGKFNFAREFVINYAGKAAS | | |
| | LFKLTNKEPFQWDTNAQECLNQLQQDIQKAVP | | |
| | HSTRKPKSSLILDIYVSKDSSVTAVKQKSVTGEE | | |
| | TLKYLSFNFSKAEKKFAKDERLLATLFCTLKQT | | |
| | CQMVTSKEKITVRTSYPELAGVTRESQRNHKAL | | |
| | KCRWKKWESLLYDQRISFELRNGIEENE | | |
| 8328 | VDVPAVTKQKIEESDFSPAGKKKLREIIASAKVA | XP_0149148 | Poecilia latipinna |
| | RFKNDCGDLGPRFVHHIEGGVHPPVRQYPLNPG | 25 | |
| | AVEEMDKIVKELGSLGIIREELNPITNSPIQAVKK | | |
| | PESAGGGWRPVINFKALNRRTIANRASLINPQGT | | |
| | LKTLRVKKFKSCIDLANGFFSLRLARQSQGKTA | | |
| | FTHKGKSYVWQRLPQGYKNSPNVFQSAVMEVL | | |
| | GDVGATVYIDDVFIADDTEEEHLERLRKVIENL | | |
| | TKAGLKLNLKKCQFGQFQVNYLGFQVTSDLGL | | |
| | SDGYREKMMNIQPPQSENELQKILGLCNYVRD | | |
| | HVPNYQKYAKPLYNCLKKSVENEGGGKRPWV | | |
| | WTAANQRDLEDLKKAIQAAVRLEPRSLSDRLV | | |
| | AEINCEEDDAMIKVSNENGGLVTLWSYTLTSVE | | |
| | KKYPQEEKELAVLARYWSVLKDLAQGQPVKVI | | |
| | TQSQVHKYLRKGTVESTKATNARWGRWEDILL | | |
| | DPELEIGPAQPTNKKRQQETPEKPGQPEWTLYT | | |
| | DGSKKESDQVAYWGFILKQDGKERCRQKGKAP | | |
| | GSAQAGEVTAILEGLLELGKRKIKSARLVTDSY | | |
| | YCAQALKEDLAIWEENGFETAKGKPVAHRDLW | | |
| | KKIAELKMQLELEVEHQRAHTHEGAHWRGND | | |
| | EVDCYVQQRKIVFVGIEKWDSTPRGREVPEEYV | | |
| | DEVVRSVHEALGHAGVRPTRKELEEHELWIPV | | |
| | KQVQRVLRDCEVCGKYNAGRRGQRLEGLTI | | |
| 8329 | VNIPEATEQKLEESDFSPEGKEKLRKIITRATVA | KAE8297773 | Larimichthys |
| | RFKNDCGDLGSKYVHTIEGGVHPPVRQYPLNPG | | crocea |
| | AVEEMDKIVTELSALDIIREEPNPITNSPIQAVKK | | |
| | PEAAGGGWRPVINFKALNRRTVANRASLINPQG | | |
| | ALKTLQVKRFKSCIDLANGFFSLRLAKQSQGKT | | |
| | AFTHKGKAYVWQRLPQGYKNSPNVFQAAVMD | | |
| | VLKDLGVTIYIDDVFLADDTEEEHLQRLRQVVE | | |
| | RLTEAGLKLNLKKCQFGQFRVNYLGFQVAADL | | |
| | GLSDGYREKLNQVRPPTSENDLQKILGLCNYVR | | |
| | DHVPNYQKYAKPLYACLKKKGEESEEETPKKW | | |
| | SWTATDQQNLGRLKAVIQDAIRLEPRSLTTRLV | | |
| | AEVSCEDDDAVVKVKNEGGGMVTLWSYTLSS | | |
| | VERKFPQEEKELAVLARYWGTMKDLAQGQGIK | | |
| | VITQSQVHRYLRKETIESTKATNTRWGRWEDIL | | |
| | LDPDLEIGPAQPANRKAQKPQETEEKSYEWILY | | |
| | TDGSRKGQDDTAYWGYILKQDGKEQFRQKGR | | |
| | VSGSAQAGEVTAILEGLLELEKRKVKTARIITDS | | |
| | YYCAQALKEDLTIWEENGYEGAKGKMVAHQD | | |
| | LWKKIAELRLKMCLDVVHQKAHGKEGAHWKG | | |
| | NDEVDRYVQQRRIVFVGREKWEQTPKGRVVPE | | |
| | SSVVEVVQAVHEALGHVGTMSTRKELEKQQL | | |
| | WIPVGRVRQVLKDCNVCGRYNAGRRGKRVDG | | |
| | LTI | | |
| 8330 | VNIPEATEQKLEESDFSHEGKEKLRKIITRATVA | KAE8289514 | Larimichthys |
| | RFKNDCGDLGSKYVHTIEGGVHPPAVKKPEAA | | crocea |
| | GGGWRPVINFKALNRRTVANRASLINPQGALKT | | |
| | LQVKRFKSCIDLANGFFSLRLAKQSQGKTAFTH | | |
| | KGKAYVWQRLPQGYKNSPNVFQAAVMDILKD | | |
| | LGVTIYIDDVFLADDTEEEHLQRLRQVVERLTE | | |
| | AGLKLNLKKCQFGQFRVNYLGFQVAADLGLSD | | |
| | GYREKLNQVRPPASENDLQKILGLCNYVRDHV | | |
| | PNYQKYAKPLYACLKKKGEESEEGTPKKWSWT | | |
| | ATDQQNLGRLKAVIQDAIRLEPRSLGVAEVSCE | | |
| | DDDAVVKVKNEGGGMVTLWSYTLSSVEKKFP | | |
| | QEEKELAVLARYWGTMKDLAQGQGIKVITQSQ | | |
| | VHRYLRKETIESTKATNTRWGRWEDILLDPDLE | | |
| | IGPAQPANRKAQKPQETEEKSYEWILYTDGSRK | | |
| | GQDDTAYWGYILKQNGKEQFRQKGLVSGSAQ | | |
| | AGEVTAILEGLLELEKRKVKTARIITDSYYCAQA | | |
| | LKEDLTIWEENGYEGAKGKMVAHQDLWKKIA | | |
| | ELRLKMCLDVVHQKAHGKEGAHWKGNDEVD | | |
| | RYVQQRRIVFVGREKWEQTPKGRVVPESSVVE | | |
| | VVQAVHEALGHVGTMPTRKELEKQQLWIPVGR | | |
| | VHQVLKDCDVCGRYNAGRRGRRVDGLTI | | |
| 8331 | VKKFKSCIYLANRFFSLRLAKQSQGKTAFTHKG | KAF0022147 | Scophthalmus |
| | KAYVWQRLPQGYKNSPNVFQSAVMDVLSGLG | | maximus |
| | ATVYIDDVFIADDTEEEHLERLQKVVERISAAGL | | |
| | KLNLKKCQFGQFQVNYLGFQVAMDLGLSDGY | | |
| | REKINQITPPTTLNELQKILGLCNYVRDHVPGYQ | | |
| | QYAKPLYACLKTKEVLRNGKPDRNWNWTATD | | |
| | QDNLRKLKDAIQQAVRLEPRSLTTKLVAEVSCE | | |
| | EEDAVLRVSNEGGGLVTLWSYTLSSVEKKYPPE | | |
| | EKELAVLAKYWGALKDLAQGQTIKVTTRSQVH | | |
| | RFLRKGTVESTKATNTRWGRWEDILLDPDLEIS | | |
| | PEKLPSKKTTKEETTDKKPYEWTLYTDGSKKG | | |
| | QDDNAYWGFILKLNEKESFRQRGRALGSAQAG | | |
| | EVTAIMEGLLELGKRKIKRVRIITDSFYCAQALQ | | |
| | EDLTIWEENGFESAKGKMVAHQDTHWRGNNE | | |
| | VDRYVQQRKVVIVGIEKWDKTPKGRVVPEEFV | | |
| | KEVVQAVHEALGHAGTIPTRKELEKQDLWIPEK | | |
| | QIRRILKDCETCGKFNAGRRGQRVDGQTI | | |
| 8332 | MKEVLIGANLAIGKNDTGLISKRFQHTIHGGQH | GCB70404 | Scyliorhinus |
| | RPQKQYPLTRGAKSELEIAIKELEQQGIIQKVTY | | torazame |
| | ALTNSSLQVVSKPDGTFRMITNYKALNKVTKK | | |
| | DKRYLINPQTTLEQVAGKIYLTSIDLANGFWSVP | | |
| | LDPDSREKTAFTFGTKHYVYCRLPQGYVNSPNH | | |
| | FQAIVRELMKDDLALVYIDDVLIGDDDQDKHV | | |
| | ERVARIIKTLSEAGFKIGLKKCQIGRSEVNYLGY | | |
| | SVSKEGREACIEMRKKVAEITAPVSRKGVKKIM | | |
| | GILGYLRPVVKDFSLYAKPIYETLKGDFIWSSEA | | |
| | QGGLDQLKTAVAISGPLVGRQEEDDLSIKLDIY | | |
| | KNGYGMVLVNHSNQTLIKHLTGIWPRAEQKCS | | |
| | DIEKCLAAII | | |
| 8333 | VDLEHEINRLVKETLLPKNELRKLLEKYRNSFA | KAG1925097 | Pimephales |
| | KSKNDCGKLDDKYEYTILGGIPAPQRQYPLNKA | | promelas |
| | AYPEIRGTLNELLRKGIISVGENCPTNAPIQAVIK | | |
| | IDGSYRLVCNFKALNRLTVPDTRYLINARDATN | | |
| | CLDDGKILSKIDLANGFWSVPLAKDSRARTAFT | | |
| | FEGKQYVFNRLPMGFCNAPNAFQAIILEILEGLP | | |
| | VTAYIDDVLIATQTTEEHMRVLSETIRKLADAG | | |
| | FLLNLKKLELGKENVNFLGFEISGAERGIAKSTQ | | |
| | EKLEELKKERITNLRQLQSLLGRLNFVRDLIPGY | | |
| | SAKAKILYKATAGKDFHWDDRLESIKCDIINMA | | |
| | LASGRIVRRNPDKNLRVKIDNTPEEMELILYNEG | | |
| | DTKSPVMFISHEKPANHKKHENMSPVDILATIA | | |
| | RNLLVIKALAAEKLIIIVAKGEGIDLLAREAKNL | | |
| | VNENKRVHVFTWSKWIKIIDDNQFEFRNEKSPK | | |
| | KDRRTVIDPEQICYFTDGSSEKGETWWGFMVK | | |
| | LKGKIIHKEKGRLDNDKSAQEAEVTAVAKAIM | | |
| | HMRDNNRKKCVLVTDSEYVYLGIVQNLSTWEQ | | |
| | NNFNNAKGKPLAQVELWKVISECAKVVQPRVL | | |
| | HQSSHTVQKTPAAVGNREVDQYVRVRAITKES | | |
| | EGNLLQELHDKLNHPSTTYVAKYCKQLGLHVQ | | |
| | NLKTSYQKIKIKCPDCRKVMSSVHHDFGHI | | |
| 8334 | FPVYKAEEEENEEIPDEISRLLEQERKTIQPYGDE | ABE77575 | Medicago |
| | LEVINLGTKEDKKEIKVGASLETSVKKQVIELLK | | truncatula |
| | EYVDVFAWSYRDMPGLDTDIVVHHLPLKPECP | | |
| | PVKQKLRRTRPDMALKIKEEVQKQIDAGFLVTS | | |
| | NYPQWLANIVPVPKKDGKVRMCVDYRDLNKA | | |
| | SPKDDFPLPHIDVLVDSTAKSKVFSFMDGFFGY | | |
| | NQIKMAPEDREKTSFITPWGTFCYKVMPFGLIN | | |
| | AGATYQRGMTTLFHDMIHKEIEVYVDDMIVKSI | | |
| | TEEDHVKYLQKMFQRLRKYKLRLNPNKCTFGV | | |
| | RSGKLLGFIVSQKGIEVDPDKVKAIREMPAPRTE | | |
| | KEVRGFLGRLNYISRFISHMTATCGPIFKLLRKE | | |
| | QGIVWTEDCQKAFDNIKKYLLEPPILIPPIEGRPL | | |
| | IMYLTVLENSMGCVLGQQDETGRKEHAIYYLS | | |
| | KKFTECESRYSILEKTCCALAWAAKRLRHYMIN | | |
| | HTTWLVSKMDPIKYIFEKPALTGRIARWQMLLS | | |
| | EYDIEYRSQKAIKGSILADHLAHQPLED | | |
| 8335 | FSSVENRREEQILFDVVNIPYNYNAIFGRATLNK | ABF96966 | Oryza sativa |
| | FKAISHHNYLKLKMPGPKGVIVVKGLQPSAASK | | Japonica Group |
| | RDLAIINRAVHNVETEPHERPKHTPKPTPHGKV | | |
| | AKVQIDDFDPTKLVSLRSPRLKLRKMSADRQEA | | |
| | AKAEIHMNPLNIPKTSFVTPFGTFCQLRMPFGLR | | |
| | NAGATFARLVYKVLGKQLGRNVKAYVDDIVV | | |
| | KIHKAFDHANNLQETFDSLRAAGIKLNPEKCVF | | |
| | SVRAGKLLGFLVSERGIEANPEKIDAIQQMKPPS | | |
| | SVHEVQKLAGRIAALSRFLSKAAERGLPFFKTL | | |
| | RGAGKFNWTPECQAAFDKLKQYLQSPPVLISPP | | |
| | LGSELLLYLAASPVAVSAALVQETESGQKPVYF | | |
| | VSEALQGAKTRYIEMEKLAYALVMASRKLKHY | | |
| | FQAHKVIVPSQYPLGEILRGKEVTGRLSKWAAE | | |
| | LSPFDLHFVARSAIKSQVLADTTEY | | |
| 8336 | VNPLSAPVLREEIAALLAKGAIEPVPPAEMESGF | XP_689703 | Danio rerio |
| | YSPYFIVPKKSGGSRPILDLRVLNRCLHKLPFRM | | |
| | LTQRRILQCVRPRDWFAAIDLKDAYFHVSILPR | | |
| | HRQFLRFAFEGRAWQYKVLPFGLSLSPRVFTKL | | |
| | AEGALAPLRLAGIRILSYLDDWLILAHSREQLIV | | |
| | HRDEVLRHLRLLGLQVNREKSKLAPVQRISFLG | | |
| | MELDSITMRLLGHMASAAAVTPLGLLHMRPLQ | | |
| | HWLHDRVPRRAWHAGTHRVSVTALCRRALSP | | |
| | WNDPSFLQAGVPLGQASSHVVVSTDASNTGWG | | |
| | AVCRGHAAAGLWKGAQLHWHINRLELLAVFL | | |
| | ALHRFLPVLERQHVLVRTDSTAAAAYINRMGG | | |
| | MRSRRMSQLARRLLLWSHPRLKSLRAIHVPGTL | | |
| | NRAADALSRQLLR | | |
| 8337 | NTEELEKLLADYPAEARVFCALEPKRDGTSRPII | WP_0156413 | Candidatus |
| | KPNKPLNQWLKRMKRALYRQRRDWPTFIHGG | 29.1 | Saccharimonas |
| | VKKRSYVSFARPHANKNTVITIDIKDCFGSITQS | | aalborgensis |
| | EVQQALVSKLGLPDGLASRLAAKLCYKRRIPQG | | |
| | FATSSYLTNLYLNDTLLKINRQLKRKQIDMTVY | | |
| | VDDIALSGQKVDSAVIINLVTLELSRARLAISKA | | |
| | KVKVMRSHSPQIICGLVVNKGVALSRQKRKEIF | | |
| | SDIA | | |
| 8338 | FHITSKKRLAILLHSSVKELNNIVRSKDQMYQYF | WP_0004460 | Acinetobacter |
| | NETQTDNSGNIIKVRPIQNPHDRLKQIHSRIGKFL | 53 | baumannii |
| | GNLKAPEYLHSKRSKSAISNAKAHVGIKGHTLN | | |
| | IDITDFYPSTSRAKVQAFFGYTLQYPTDIAKYLS | | |
| | EICTVKNCLPTGSPLSSALAFWANKSMFDEIYR | | |
| | VAKSRAITMTVYVDDISFTGRAVNQNFLKKIIQI | | |
| | VGKYQHKIKQEKIKFFPEYSVKFVTGVAILNGR | | |
| | LQPAHRHYRDIRVLQK | | |
| 8339 | ARKENYYKAFDHASKNKHGKKAIIKFEADLEK | WP_0119662 | Parabacteroides |
| | NLSDLLYSFENGTFVTSPYRFMTVHEPKKRLIG | 32.1 | distasonis |
| | MLPFPDHVQHWAMLNEVEDYFTRSFSAYTYGG | | |
| | VKGRGPHAYMRMIRKVLRKYPERTTDYLLCDI | | |
| | HHFYPTVNHPVLKSQLRTRIKDNHLLRRLDEIID | | |
| | SVEGDTGMFPGTKLAQFFSLVYLYLFDHDLKRC | | |
| | FHVGECPALVEYYTKRYIEESIATAKTEHDYEEL | | |
| | SKGIQYLSDRFKGYLNRLDFCYRLADDVLILHE | | |
| | DTVFLHLVIEWIGLYYANELRIGLNPRWK | | |
| 8340 | FSDSLPPIFSSEELSLKESNINVSKDYLSKNGSNK | WP_0914746 | Aliicoccus |
| | RSKLINFSIPKNSSFRRTLSIVHPLHYIKFANLIDE | 05.1 | persicus |
| | QWENISKHFEKSSVSLTKIIKNNSKLEREHGFEA | | |
| | MRYKQIENLSLNRFILKIDINRYYPSIYTHSIPWA | | |
| | LHGKKYSKLNISEENLGNNLDTLTRNMQDGQTI | | |
| | GIPIGPFSSDIIQEIIGTAIDEDFSKKMEYKVPGYR | | |
| | YTDDMEYYFKNLNEANNALSVMNNVLKNYEL | | |
| | DLNSEKTVIEKIPMVLEKEWIRSLKNFRENKNYS | | |
| | KKNVRKEKELLIEYFNSIFN | | |
| 8341 | VPPALWGSRHNQRRFLRNVKKFISLGKHAKLSP | XP_0047684 | Mustela putorius |
| | QELTWKMKVQDCAWLRGSPGACSVPAAEHRR | 47 | furo |
| | REGVLARLLCWLMGTYVVELLRSFFYVTETTF | | |
| | QKNRLFFYRKSVWSPLQTLGVRQHCTSVRLREL | | |
| | SAAEVRRQHEARATLLTSRLRFLPKPGGLRPIVN | | |
| | MDYVAGARALCRDKKIQHLTSQVKTLFSVLNY | | |
| | ERARRPRLLGASVLGMDDIHRAWHDFVLRVRA | | |
| | QDPAPRLYFVKVDVTGAYDALPQDRLAEVVAN | | |
| | VLRPHENTYCLRRYAVVRRTAQGHVRRSFKRH | | |
| | VSTFTDLPPYMRQFVERLQETTSLRDSVVIEQSY | | |
| | SLNEASSGLFQLFLSLVYSHVIRIGGNLLLRLVD | | |
| | DFLLITPHLKRAQAFLRTLVRGVPEYGCSANLQ | | |
| | KTAVNFPVEDMALGSTAPLQLPAHCLFPWCGL | | |
| | LLDTQTLEVS | | |
| 8342 | LDLKVIKPSKSPHMAPAFLVNNEAEKRRGKKR | NP_056728 | Cauliflower |
| | MVVNYKAMNKATVGDAYNLPNKDELLTLIRG | | mosaic virus |
| | KKIFSSFDCKSGFWQVLLDQESRPLTAFTCPQG | | |
| | HYEWNVVPFGLKQAPSIFQRHMDEAFRVFRKF | | |
| | CCVYVDDILVFSNNEEDHLLHVAMILQKCNQH | | |
| | GIILSKKKAQLFKKKINFLGLEIDEGTHKPQGHIL | | |
| | EHINKFPDTLEDKKQLQRFLGILTYASDYIPKLA | | |
| | QIRKPLQAKLKENVPWRWTKEDTLYMQKVKK | | |
| | NLQGFPPLHHPLPEEKLIIETDASDDYWGGMLK | | |
| | AIKINEGTNTELICRYASGSFKAAEKNYHSNDKE | | |
| | TLAVINTIKKFSIYLTPVHFLIRTDNTHFKSFVNL | | |
| | NYKGDSKLGRNIRWQAWLSHYSFDVEHIKGTD | | |
| | NHFADFLSREFNKVNSSGGS | | |
| 8090 | QHYHDTIQQENQLIPSFFTYIAKLKQDLDSLPDE | XP_0012490 | Coccidioides |
| | FFHKRRSKVKDYPQTKKTPVKPLPKISEEEHKQ | 02 | immitis RS |
| | QIDEELCLRCGQPGHKTKFCTNSSNKSQQTDKK | | |
| | NKNQAKTRTAKPMQDPGQTLERQGVNPIKKAS | | |
| | RCKQAALLDSGTTVNSISYKLASQLDWDQPETP | | |
| | MEVIEMLNRAEADWYSIYKTQLTITDSMGTIKM | | |
| | KKYYCPSRQRFYKNDILIFSASEKEHEKHVRLV | | |
| | MEYLREYQLFAKLAKCAFKRQTISYLGYIIDNE | | |
| | GIKMDPKQIQVITEWLLLQSFHNIQIFLGFANFY | | |
| | QRFIQKYSVIVALLTDLLKSSEKRRKKEPFLLTP | | |
| | TTRKVFCELQAVFFREPVIQHYNPECRIHLETDT | | |
| | SEHAAEMVQGRPGGTKIIDVLNLLLEAQGDDSS | | |
| | VQARFTKTESQQSE | | |
| 8343 | AASSLSTLQHVTLQKLNKLDSQRQQFESDKKSI | EAT92517_1 | Parastagonospor |
| | LEQVSSVPDHRSKVEALLDGFELHGIAPKQADL | | a nodorum SN15 |
| | SISNLKHFVHQAKHDPSVSASLLKDWQSRLEHE | | |
| | LNVKSNKYEYAALFGKLVTEWIKHSTLVKSAD | | |
| | VSDGSIAKGRKKMQEQRQSWENYAFVEKEVN | | |
| | QSTIEQYLSDIFGDALQTEKIKKSPLRVLRDSMK | | |
| | EVMDFKSDLDTSEKDFSSNKRFGHSAPHGSRFTI | | |
| | ELLQSCIRGVKKADLFTGRKLEMIIDLEKQPAVL | | |
| | KELVDVLNMDVDGLDHWEWDGPVPLNMRRQ | | |
| | TNEIHQAILLHFIGKTWAVALKKAFTNFYHSGA | | |
| | WLQAPYRSMPKKIRQRREHFIENSNKSGDSVRN | | |
| | YRRQKYQQEYFMTQLPSNAFEDAREYDAAEGQ | | |
| | EKNSHIATKQTMLRLLTTEILLNTKVYGECSVL | | |
| | QSDFKWFGPSLPHDTIFAVLEFFGVPAKWLRFF | | |
| | KRFLEVPVVFAQDGAGAKARVRKCGIPNSHILS | | |
| | DALGEAVLFCLDFAVNRRTKGANIHRFHDDLW | | |
| | FWGQETTSVQAWEAIKEFTEVMGLQLNEEKTG | | |
| | SSIIVADKSRARVPHPNLPEGNLHWGFLELDAS | | |
| | AGRWVIDRAQVDEHITELRRQLDACHSVMAWI | | |
| | QAWNSYVGLFFNTNFAQPANCFGRQHNDMIIE | | |
| | TFSHIQRSFFGKYGTANVTEYLRSVLKERFQTTD | | |
| | AVPDAFFYFPVELGGLGLNNPSISAFATYQNSSR | | |
| | DPSARIERAFEEEREAYDTAKQRWDAGDVPCP | | |
| | NRETDEPFMSFEEYTAFREETSHPLFEAYMNLL | | |
| | ECPVEERVETSDEMYEALRRSDAPHALGSNHY | | |
| | WLWIFNLYAGDLKQRFGGQGVQLGERDLLPVG | | |
| | LVEVLKSEKIYPGSNPFGINQLFTLFRLRKKLRM | | |
| | SVANGWGGYDVTKEPRRTNKDEL | | |
| 8344 | PSTQTEFEKQLQQMLLDADALQSDEERVKLRT | XP_0225179 | Astyanax |
| | VLTKYRASFSQDSMDCGLTHIHMIRIPTHPDAAP | 07 | mexicanus |
| | AYVRQYKIPLASYGPVQEIIDDLLDKGIIRPCNST | | |
| | YSAPLWPVLKPNGKWRLTIDYRRLNDQVPLSR | | |
| | WPMTQLEQELPRVRDAKYFSTLDVASGFWTIP | | |
| | VHVEDQHKLAFTFAGRQFTFTRCPFGYSNSPAE | | |
| | FNIFLNKACPDARERGTLIYVDDVLIRNNSLDAH | | |
| | LEEIDHVLDQLTKAGAKISLAKCQWCKTKVNY | | |
| | VGLLVGPDGVLPQPCRAQGIVDIAEPKTIHALRS | | |
| | FLGVCNYSRQFIENFAELAKPLYQLLKQDVPFI | | |
| | WGEAQAQAMQTLKDKLASAPCLTYPDHSREFY | | |
| | LQVGFSEHCVSAGLYQVHDRDKRVVAYASKAL | | |
| | MAPELKYSDCEKALLATVWAVKHFSNYLGGQ | | |
| | KIIVETNHQPVVFLNSQRIREGVVTNARVASWL | | |
| | MALQSFEVEVRYAQNSRLPLGTDLAACQRCET | | |
| | DIPATSVPIPNLASQKPTNHRYFDPKECENIPTVY | | |
| | VDGCSFRHDQEGLKAGAGIVWLDDNPCEPQQF | | |
| | KLGSQTSQYAEIAAILITIQLAIDQGVKTLVICTD | | |
| | SNYARLSFTCHLPIWKTKGFLTSGRKAVKHTEL | | |
| | FTAADYLVVRHDMLVYWKKVRGHSRVPGTDK | | |
| | TYNDQADSLAKRGALEGVSWVFDPLKYPTQPN | | |
| | PTVLAVTRAQAKQTSTTEIPPCAAVSIDPEITDA | | |
| | DLITLQDADPDIKSIKAFLLDPTNNPITSQMLEAS | | |
| | IPLKQLLDNRAFLKVVKGLLVHVTETHTSPAFV | | |
| | VPPCHRGVMLGHAHDSPSAGHKGIKETYRTLK | | |
| | QVAFWPRMREHVASYIKGCLVCCQFQPANPLH | | |
| | RAPLQRK | | |

TABLE 12
Exemplary ancestral sequence reconstruction (ASR) RT domains

| SEQ | | | |
|---|---|---|---|
| ID | | | |
| NO: | Sequence | Length | Name |
| 8345 | QKEPTQDVTLPQTWLTDFPQAWAETAGMGLAVQQAPLVIE | 478 | N43.ZFERV |
| | LKATATPVSIKQYPMSREARRGIKPHIQRLLDQGILVPCQSP | | |
| | WNTPLLPVKKPGTNDYRPVQDLREVNKRVEDIHPTVPNPYN | | |
| | LLSGLPPERQWYTVLDLKDAFFCLRLHPTSQPLFAFEWRDP | | |
| | ETGMSGQLTWTRLPQGFKNSPTIFDEALHRDLADFRIQHPD | | |
| | VTLLQYVDDLLLAADTEQDCLKGTQALLQTLGELGYRASA | | |
| | KKAQICQREVTYLGYKLKGGQRWLTEARKETVLQIPTPKTA | | |
| | RQVREFLGTAGFCRLWIPGFAELAAPLYPLTKEGSAFNWGE | | |
| | KEEKAFQELKQALLTAPALGLPDLTKPFQLFVDEKQGIAKG | | |
| | VLTQKLGPWRRPVAYLSKKLDPVAAGWPPCLRMVAATAL | | |
| | LTKDAGKLTMGQEIVILTPHAVEAVLKQPPDRWLSNARMIH | | |
| | YQALLLDTPRVQFHPTVALNPATTEPLPES | | |
| 8346 | SKEPKQDVTLPQTWLSDFPQAWAETAGMGLAVQQPPIVIQL | 478 | N42.ZFERV |
| | KATATPVRIKQYPMSREARRGIKPHIQRLLDLGILVPCQSPW | | |
| | NTPLLPVKKPGTNDYRPVQDLREVNKRVEDIHPTVPNPYNL | | |
| | LSSLPPERQWYTVLDLKDAFFCLPLHPESQPLFAFEWRDPET | | |
| | GRSGQLTWTRLPQGFKNSPTIFDEALHRDLADFRIQHPDLTL | | |
| | LQYVDDLLLAADTEQDCLKGTQALLQTLGELGYRASAKKA | | |
| | QLCQREVTYLGYKLKGGQRWLTEARKETVLQIPTPKTPRQV | | |
| | REFLGTAGFCRLWIPGFAELAAPLYPLTKEGNAFNWGEKEE | | |
| | KAFQELKQALLQAPALGLPDLTKPFQLFVDEKQGIAKGVLT | | |
| | QKLGPWKRPVAYLSKKLDPVAAGWPPCLRMIAATALLTKD | | |
| | AGKLTLGQEIVILTPHAVEAVLKQPPDRWLSNARMIHYQAL | | |
| | LLDTPRVQFDPSVALNPATTETLPES | | |
| 8347 | LTQGDIQEINPEVWATEGKYGCLDIPPIKIEMQKDTPAIRVK | 446 | N30.ZFERV |
| | QYPMSPEGKKGLASVIEHLLKENILEPCMSPHNTPILAIKKDE | | |
| | GKFRLVQDLREINKRTIARHPVVPNPYTLLSKIPREHTWFTVI | | |
| | DLKDAFWACPLAEECRDWFAFEWEHPDRGRKQQLRWTRL | | |
| | PQGYTESPNIFGQALETLLEQFSPKEGVQILQYVDDLLISGET | | |
| | EKEVKDVSIQLLNFFGEKGLKVSQSKLQFVETEVTYLGHIIG | | |
| | KGSKRLSPARISGIVSISPPKTKRDIRKLLGLFGYCKHWIDKY | | |
| | TQGVKFLYDKLIDQEPMNWTESDEKQLQDLKEKLSSAPVLS | | |
| | LPDLKKEFDLFVNTEEGIAYGVLTQEWGGYRKPVAFLSKLL | | |
| | DPVARGWPACLQAVAAAAILIEEAQKLTLQGKIPHDLKTILS | | |
| | QRAQDNLELTTSPHQRDRTLTFKRNKR | | |
| 8348 | LTQEDIEEINPEVWAEEGKSGLLDIPPIKIEMQKETPPIRVKQ | 468 | N22.ZFERV |
| | YPISPEGRKGLAPIIEQLLKEGILEPCMSPHNTPILAVKKAEG | | |
| | KYRLVQDLREINKRTVTRHPVVPNPYTLLSQIPREHAWFTII | | |
| | DLKDAFWACPLAEECRDWFAFEWEHPETKRKQQLRWTRLP | | |
| | QGFTESPNLFGQALEKLLEQFSPEEGVQILQYVDDLLISGED | | |
| | QSEVRETSIQLLNFLGEKGLKVSKSKLQFVESEVTYLGHLIG | | |
| | KGYKRLSPERIAGILSIPPPKTKRDIRKLLGLFGYCRLWLDKY | | |
| | TQSVKFLYDKLVDSEPIEWTEEDEKQLKDLKEKLSSAPVLSL | | |
| | PDLKKEFDLFVNTEEGVAYGVLTQEWGGCKKPVAFLSKLL | | |
| | DPVARGWPTCLQAVAAAAILIEETQKLTLQGKIRVHTPHDL | | |
| | KTILSQKAQKWLTDSRILRYEIALMNTDNLEFTTSPIQRDRT | | |
| | LTFKRNKK | | |
| 8349 | LTLEDEEKINPEVWYTPDSVGRLDIEPITVTIKDPDTPIRIKQY | 644 | N8.ZFERV |
| | PISLEGRRGLKPVIERLLSKGLLEPCMSPHNTPILPVKKPDGS | | |
| | YRLVQDLREINKRTVTRFPVVANPYTLLSKLSPENQWYSVI | | |
| | DLKDAFWACPLDEESRDYFAFEWEDPETHRKQQLRWTVLP | | |
| | QGFTESPNLFGQALEQLLQEYQTGEGVTLIQYVDDLLIAGET | | |
| | EEEVRKESIKLLNFLGLKGLKVSKAKLQFVEEEVKYLGHWL | | |
| | SKGEKKLDPERVKGILSLPPPKSKRQIRQLLGLLGYCRQWIE | | |
| | NYSSKVKFLYEKLSQGGLVKWTEEDEKQLKRLRQDLIQAP | | |
| | VLSLPDLKRPFYLFVNTDNGTAYGVLTQEWAGKKKPVGYL | | |
| | SKLLDPVSKGWPTCLQAVVACALLTEEAHKITFNSELKVLS | | |
| | PHNIRGILQQKADKWITDSRLLKYEGILLDSPKLTLEVTGLQ | | |
| | NPAQFLYDEKPVAHNCMATIEEQTKIRPDLEEEELETGERLF | | |
| | VDGSSRVIEGKRVSGYAIIGGPEVIESGPLNKTWSAQACELY | | |
| | AVLRALERLKDKEGTIYTDSKYAFGVVHTFGKIWENAADQ | | |
| | EAKKAALTESEQKLKALFLPKRLSIIHCPGHQKGHSAEARG | | |
| | NRMADQAARKAAITETPDTSTLL | | |
| 8350 | LTQEDEEKINPEVWHTEDEAGRLDIEPISIEIERPEDPIRIKQY | 644 | N7.ZFERV |
| | PISLEGRRGLKPIIERLLKKGILEPCMSPHNTPILPVKKPDGSY | | |
| | RLVQDLREINKRTVTRFPVVANPYTLLSRVSPENQWYSVIDL | | |
| | KDAFWACPLAEESRDYFAFEWEDPETNRKQQLRWTRLPQG | | |
| | FTESPNLFGQALEQLLQQFSPGEGVTILQYVDDLLIAGETEEE | | |
| | VREATIKLLNFLGEKGLKVSKSKLQFVEPEVKYLGHWISKG | | |
| | KKRLDPERVAGILSLPPPKSKRQIRQLLGLLGYCRQWIENYS | | |
| | QKVKFLYEKLTEGGKIKWTEEDEKQLKRLKQALITAPVLSL | | |
| | PDLKKPFHLFVNTDNGTAYGVLTQEWAGVKKPVGYLSKLL | | |
| | DPVSRGWPTCLQAIVAVALLIEEAQKITFGGELIVYTPHNVR | | |
| | TILQQKAEKWLTDSRLLKYEAILLNAPKLELRVTKLONPAEF | | |
| | LYLEKPVSHNCTDTIEEQTKVRPDLEDEELEEGEKWFVDGS | | |
| | SRVIEGKRKSGYAIINGKEVIESGPLNASWSAQACELFAVLR | | |
| | ALERLKGKVGTIYTDSKYAFGVVHTFGKIWENLADQEAKK | | |
| | AALTESRQKLKALFLPKRLSIIHCPGHQKGHSAEARGNRMA | | |
| | DQAARKAAITETPDTSTLL | | |
| 8351 | LTLEDEEKINPEVWHTEDEAGRLDIEPITIEIERPEDPIRIKQYP | 646 | N6.ZFERV |
| | ISPEGRRGLKPIIERLLKKGILEPCMSPHNTPILPVKKPDGSYR | | |
| | LVQDLREINKRTVTRYPVVPNPYTLLSKVSPEHQWFSVIDLK | | |
| | DAFWACPLAEESRDIFAFEWEDPETGRKQQLRWTRLPQGFT | | |
| | ESPNLFGQALEKLLQQFSPPEGVTILQYVDDLLIAGETEEEV | | |
| | REATIKLLNFLGEKGLKVSKSKLQFVEPEVKYLGHLISKGQR | | |
| | KLSPERVAGILSLPPPKSKREIRKLLGLLGYCRLWIEGYTETV | | |
| | KFLYEKLTEGGKIKWTEEDEKQLQELKQALTTAPVLSLPDL | | |
| | KKPFHLFVNTEEGIAYGVLTQEWGGCKKPVAYLSKLLDPVS | | |
| | RGWPTCLQAVAAVAILIEEARKLTFGGKLVVYTPHAVRAIL | | |
| | QQKAEKWLTDSRLLKYEAILLDKPRLELHVTKLVQNPAEFL | | |
| | YLEPKPVHHDCTETLEENTKRRPDLEDEELEEGEKWFVDGS | | |
| | SRVIEGKRKSGYAIINGKEVIESGPLNASWSAQACELFAVLR | | |
| | ALERLKGKVGTIYTDSKYAFGVVHTFGKIWENLADQEAKK | | |
| | AALTESRQKLKALFLPKRLSIIHCPGHQKGHSAEARGNRMA | | |
| | DQAARKAAITETPDTSTLL | | |
| 8352 | LTQEDEEKINPEVWHTEEEAGRLDIEPISIEIERPEDPIRIKQYP | 480 | N20.ZFERV |
| | ISLEGRRGLKPIIEQLLKKGILEPCMSPHNTPILPVKKPDGSYR | | |
| | LVQDLREINKRTVTRYPVVPNPYTLLSKVPPEHQWFSVIDLK | | |
| | DAFWACPLAEESRDIFAFEWEDPETRRKQQLRWTRLPQGFT | | |
| | ESPNLFGQALEKLLQQFSPPEGVQILQYVDDLLISGEDEEEV | | |
| | REATIKLLNFLGEKGLRVSKSKLQFVEPEVKYLGHLISKGSK | | |
| | RLSPERIAGILSLPPPKSKREIRKLLGLLGYCRLWIEKYTQTV | | |
| | KFLYEKLTEGDKIKWTEEDEKQLKKLKQKLTSAPVLSLPDL | | |
| | KKPFHLFVNTEKGVAYGVLTQEWGGVKKPVAYLSKLLDPV | | |
| | SRGWPTCLQAIAATAILIEEAQKLTFGGKLIVYTPHNVRTILN | | |
| | QKAEKWLTDSRLLKYEAALMNKPRLELHVTKIVEDPAEFT | | |
| | YTPVQHDCTLTLKRQKK | | |
| 8353 | LTLEDEEKINPKVWHTGREAGRLDIEPISIEIERPEDPIRIKQY | 465 | N14.ZFERV |
| | PISLEGRRGLKPIIEDLIKKGILEPCMSRHNTPILAIKKTDGSY | | |
| | RLVQDLRAINERTKTRFPVVANPYTLLNRVSPEDTWYSVID | | |
| | LKDAFWTCPLAEGSRDYFAFQWEDPDTNRKQQLRWASLPQ | | |
| | GFVDSPNLFGQALEQLLSQFSPGEGTKILQYVDDLLVAGETE | | |
| | EDVRECTIELLNFLGEKGLKVSKSKLQFTEPEVKYLGHWITK | | |
| | GKKKLDPERVAGILELPPPKNKRQVRQLLGLLGYCRQWIEG | | |
| | YSEKVKFLYEKLTTDKIKWTEQDEKELQRLKEALITAPVLSL | | |
| | PDVKKKFQLFVDVSNHTAHGVLTQEWAGDKKPVGYLSKLL | | |
| | DPVSRGWPTCLQAIVAVALLIEEAKKITFGGDLVVYTPHNV | | |
| | RLILQQKAERWLTDARLLKYEAILIHAPELELRVTKASNPAE | | |
| | FLYLGK | | |
| 8354 | LPTQVEDAVVPWVWSTEGPGKSIAVEPVVIELKEGEQPVRI | 647 | N55.ZFERV |
| | KQYPMKPEARRGIKPIIEQFLKLGILEECQSEYNTPILPVKKP | | |
| | NGEYRLVQDLRAVNKITEDIYPVVANPYTLLTSLSPEHQWF | | |
| | TVIDLKDAFFCIPLEPESQKIFAFEWENPETGRKTQLTWTRLP | | |
| | QGFKNSPTIFGEQLAKDLEEWKAPPESGVLLQYVDDLLIATE | | |
| | TKEACIKATIALLNFLGQKGYRVSKKKAQLVQQEVIYLGYEI | | |
| | SGGQRKLGPDRKEAICQIPKPKTVKELRSFLGMVGWCRLWI | | |
| | PNYGLLAKPLYELLKEGSDKLNWTKEAEKAFQELKQALTT | | |
| | APALGLPDLSKPFQLFVNEKQGIALGVLTQKLGPWRRPVAY | | |
| | LSKQLDTVAAGWPSCLRAVAAVAILIQEARKLTMGQKMVV | | |
| | YVPHAVSAVLEQKAGHWLSSSRMLKYQAILLEQDDVELAV | | |
| | TNVLNPATFLYSEPEPVHHDCLETIEASYSSRPDLKDTPLED | | |
| | AEEWFTDGSSYVISGKRKSGYAVTTCKEVIESGPLNPSYSAQ | | |
| | KAEIIALTRALELAKGRTVNIYTDSRYAFGVVHAHGAIWKE | | |
| | LADREAKKAAKTELQQSLKALFLPKRLSIIHCPGHQKGHSA | | |
| | EARGNRMADQAARKAAITETPDTSTLL | | |
| 8355 | LPKQVEDAVVPWVWSTEGPGKAVAVEPVVIELKPGEQPVRI | 647 | N54.ZFERV |
| | KQYPMKREARKGIKPIIERFLKLGILEECQSPYNTPILPVKKP | | |
| | NGEYRLVQDLRAVNKITVTIYPVVPNPYTLLSSLSPEHQWFT | | |
| | VIDLKDAFFCIPLEPESQKIFAFEWEDPETGRKTQLTWTRLPQ | | |
| | GFKNSPTIFGEALAKDLQEWKAPPESGTLLQYVDDLLIATET | | |
| | KETCIKATIALLNFLGEKGYRVSKKKAQLVQQEVTYLGYEIS | | |
| | KGQRRLSPDRKEAICQIPKPKTVRELRSFLGMVGWCRLWIP | | |
| | NYGLLAKPLYELLKEGSDPLNWTEEEEKAFQQLKQALTTAP | | |
| | ALGLPDLSKPFQLFVNEKQGIALGVLTQKLGPWKRPVAYLS | | |
| | KQLDPVAAGWPSCLRAVAATAILIQEARKLTLGQKMVVYV | | |
| | PHTVSAVLEQKAGHWLSSSRLLKYQAILLDQPDVELKVTKV | | |
| | INPATFLYSEPEPVHHDCLETIEASYSSRPDLKDTPLEDAEEW | | |
| | FTDGSSYVINGKRKSGYAIITCKEVIESGPLNPSYSAQKAELI | | |
| | ALTRALELAKGRTGNIYTDSKYAFGVVHAHGAIWKELADR | | |
| | EAKKAAKTDLQQPLKALFLPKRLSIIHCPGHQKGHSAEARG | | |
| | NRMADQAARKAAITETPDTSTLL | | |
| 8356 | LPTQVVTAVVPQVWLSPHLDLFYRTDFPKAWAETEGPGKAI | 666 | N38.ZFERV |
| | QVEPVVIELKPGEQPVRIKQYPMSPEARRGIKPIIERLLKLGIL | | |
| | EPCQSPYNTPILPVKKPDNGEYRLVQDLRAVNKRTVTIYPV | | |
| | VPNPYTLLSSLSPEHQWFTVIDLKDAFFCIPLAPESQPIFAFE | | |
| | WEDPETGRKTQLTWTRLPQGFKNSPTIFGEALAKDLQEFPA | | |
| | PPEGVTLLQYVDDLLIAAETEEACLKATIALLNFLGQKGYR | | |
| | VSKKKAQLCQQEVTYLGYEISGGQRKLSPDRKEAILQIPKPK | | |
| | TVKELRSFLGMVGYCRLWIPGYAELAKPLYELLKEGSDKLN | | |
| | WTEEAEKAFQELKQALTTAPALGLPDLSKPFQLFVNEKQGI | | |
| | ALGVLTQKLGPWRRPVAYLSKKLDPVAAGWPSCLRAVAA | | |
| | VAILIQEARKLTMGQKMVVYTPHAVSAVLEQKADRWLSNS | | |
| | RMLKYQAILLDKPRVELHVTKVLNPATFLYSEPEPVHHDCL | | |
| | ETLEESYSRRPDLKDTPLEDAEEWFTDGSSYVISGKRKSGYA | | |
| | IITCKEVIESGPLNPSYSAQKAELIALTRALELAKGRTVNIYT | | |
| | DSKYAFGVVHAHGAIWKELADREAKKAAKTELQQSLKALF | | |
| | LPKRLSIIHCPGHQKGHSAEARGNRMADQAARKAAITETPD | | |
| | TSTLL | | |
| 8357 | LTGQVVTAVVPQLWLTEDEGGLIQVEPVTIELKPGEQPVRIK | 651 | N37.ZFERV |
| | QYPLSPEARRGIKPIIERLLKKGILEPCQSPYNTPILPVKKPDN | | |
| | GTYRLVQDLRAINKRTVTIYPVVPNPYTLLSSLSPEHQWFTV | | |
| | IDLKDAFFSVPLAPESQPIFAFEWEDPETGRKQQLTWTRLPQ | | |
| | GFKNSPTIFGQALEKTLQEFPAPPEGVTLLQYVDDLLIAAET | | |
| | EEECLKATIALLNFLGQKGFKVSKKKLQLCQPEVTYLGHEIS | | |
| | GGQRKLSPDRVAAILQLPKPKTVKELRSFLGLVGYCRLWIP | | |
| | GYTELAKPLYELLKEGSPPKDKLNWTEEAEKQFQELKQALT | | |
| | TAPALGLPDLKKPFHLFVNEKEGIALGVLTQKLGGHRRPVA | | |
| | YLSKKLDPVAAGWPSCLRAVAAVAILIQEARKLTMGQKMV | | |
| | VYTPHAVSAVLEQKADRWLSNSRMLKYQAILLDKPRVELH | | |
| | VTKVQNPATFLYSEPEPVHHDCLETLEESYSRRPDLKDTPLE | | |
| | DAEEWFTDGSSYVISGKRKSGYAIITCKEVIESGPLNPSYSAQ | | |
| | KAELIALTRALELAKGRTVNIYTDSKYAFGVVHAHGAIWKE | | |
| | LADREAKKAAKTELQQSLKALFLPKRLSIIHCPGHQKGHSA | | |
| | EARGNRMADQAARKAAITETPDTSTLL | | |
| 8358 | IPEEVEQAVVPWVWETDTPGKSKAAQPVVVELKEGKEPVRI | 632 | N56.ZFERV |
| | KQYPIKPEARQGIKPIIDKFLKLGILEECESEYNTPIFPVKKPN | | |
| | GEYRLVQDLRAINEITKDIYPVVANPYTLLTSVSEKHEWFTV | | |
| | IDLKDAFFCIPLEKESRKLFAFEWENPDTGRKTQLTWTRLPQ | | |
| | GFKNSPTIFGNQLAKELEEWKTTQVKVPPESYVLLQYVDDI | | |
| | LIATEEKETCIKLTISLLNFLGQGGYRVSKKKAQLVRQEVIY | | |
| | LGCEISQGQRKLGTNRIEAICAIPEPRNHQELRSFLGMVGWC | | |
| | RLWILNYGLIAKPLYEALKEPRLTWGKQQEKAFLELKQALT | | |
| | EAPALGLPDLSKDFQLFVNERQRLALGVLTQRLGPWKRPVG | | |
| | YFSKQLDTVSAGWPSCLRAVAATVILIQEARKLTLGRKIEVY | | |
| | VPHMVTAVLEQKGGHWLSSSRMLKYQAILMEQDDVELKIT | | |
| | NLINPAEFLSEEGPLAHDCVEIIEQTYASREDLKDVLLEQAEE | | |
| | WFTDGSSFGKNATGWAVSNNPQYSAQKAEIIAYIRAKGRTG | | |
| | NFYTDSRYAFGVVHAHGAIWKELADREAKKAAKTELQQSL | | |
| | KALFLPKRLSIIHCPGHQKGHSAEARGNRMADQAARKAAIT | | |
| | ETPDTSTLL | | |
| 8359 | LTGQVVTAVVPQLWLSLPPDPHLDLFYRTDFPKAAAIDDSL | 447 | N67.ZFERV |
| | WSESEDEGGLIQVEPVKIKLKPGERPVRIKQYPLSPEAEQGIK | | |
| | PIIERLLKKGILEPTQSPYNTPILPVKKPDNGTYRLVQDLRAI | | |
| | NKLTVTITPVVPNPYTLLSSLSPKHQWFTVIDLADAFFSVPL | | |
| | DPESQPIFAFTFENQQYTWTRLPQGFKNSPTIFSQALKKTLQE | | |
| | FPALPEGVTLLQYVDDLLIAAETEEECLKATIALLNFLAQKG | | |
| | FKVSKKKLQLCQPEVTYLGHEISGGQRKLSPDRVAAILQLPK | | |
| | PKTVKELQSFLGLVGYCRTWIPDYTELAKPLRELLRHEGSPP | | |
| | KDKLNWTEEAEKQFQELKKALTTAPALGLPDYKKPFHLHV | | |
| | NEKEGIALGVLLQKHGGHRRPVAYLSKKLDPVAAGWPSCL | | |
| | RAVAAVAIAIQEARHLVMGHKMVVYTPHA | | |

TABLE 13
Exemplary RT domains derived from a Cas-RT

| SEQ | | |
|---|---|---|
| ID | | |
| NO: | RT sequence | name |
| 8199 | STIDVTLKEVADPIRLKLAWTKIKKKGSIGGVDGVTISSFNANLE | A0A0M9DZB1 |
| | VNLSELSNQILTNQYTPEPLQAAHIPKPGKSEKRQLGLPSLKDKI | |
| | VQSSLASILSDFYEIHFSNCSYAYRPGKGSVKAIGRVRDFLNRKN | |
| | YWIASVDIDNFFDSVDHEICTSILKEQISDQSIIRLISLYFSSGM | |
| | IKFDQWQDTEIGIPQGGAISPVISNIYLNKLDHFLHTLNAFFVRY | |
| | ADDIILFSNTQQSLSETYQKTNEFLNKKLNLKLNALDNPIINVSK | |
| | GFSFLGIYFHRCQLKIDFKRIDEKIEKMKYIIHKQKQIDAVIKEI | |
| | NEFFNGVQRHYGNIIPDSYQLKNLESTVLDELSIFLAKMKNEGHI | |
| | NSKKACKLVLDPLVFMSERTKSQRDAVIDKIIADAFTIVDQKKDT | |
| | DEKRIEKSVDSAIHQKRQAYAKKIATETE | |
| 8199 | STIDVTLKEVADPIRLKLAWTKIKKKGSIGGVDGVTISSFNANLE | A0A0M9DZB1 |
| | VNLSELSNQILTNQYTPEPLQAAHIPKPGKSEKRQLGLPSLKDKI | |
| | VQSSLASILSDFYEIHFSNCSYAYRPGKGSVKAIGRVRDFLNRKN | |
| | YWIASVDIDNFFDSVDHEICTSILKEQISDQSIIRLISLYFSSGM | |
| | IKFDQWQDTEIGIPQGGAISPVISNIYLNKLDHFLHTLNAFFVRY | |
| | ADDIILFSNTQQSLSETYQKTNEFLNKKLNLKLNALDNPIINVSK | |
| | GFSFLGIYFHRCQLKIDFKRIDEKJEKMKYIIHKQKQIDAVIKEI | |
| | NEFFNGVQRHYGNIIPDSYQLKNLESTVLDELSIFLAKMKNEGHI | |
| | NSKKACKLVLDPLVFMSERTKSQRDAVIDKIIADAFTIVDQKKDT | |
| | DEKRIEKSVDSAIHQKRQAYAKKIATETE | |
| 8360 | GQYQLQDAYGYCSYPRPQAAKSLLEKSLSDASLHQACQTMYPRQA | F2K1V9 |
| | NFDSSDTDEEHHDAIDELLTKLYVSRERIFKREFTPSQLHSVEIE | |
| | KPEGGTRLLSVPNWHDRTLQKAVTECLGNTLEHIWMKHSYGYRKG | |
| | HSRLQARDQINQYIQQGYEWVLESDIESFFDSVNWLNLEQRLKLL | |
| | LPNEPLVPLLMQWVSAAKQTEDEQTLARHNGLPQGAPISPILANL | |
| | LLDDLDQDMIAKGHQIVRYADDFVLLFKSKAAAESALDDIITALK | |
| | EHHLAINLEKTRIVEASQGFRYLGYLFGGSQYKLILNGKTLKGET | |
| | TTEAVDAATAEKVFKQYANDNGVDGEWTYDDATKTFTVTEGGSKL | |
| 8361 | GWLYNQMAMPETIFQAWYKVASNDGRPGWDNKSIEDYSLQLEENL | B3EIR7 |
| | KALSQALLTGTYKQGPLMKLVLLKPDGKDRVLLIPGVMDRVAQTA | |
| | AAIVLSPIIEAELGNCTFAYRPGISREGAAREIDRLHREGYQWVL | |
| | DADIRSFFDNVRHDLLFQRLVELIDDKEMISLLHRWLTAEIVDGI | |
| | NPRIQNTMGLPQGCPISPALANLYLDRFDETMEKEGFKLVRFADD | |
| | YLVLCKTRPKAEAALKLSETALAELKLELHSDKTRITTFAEGFKY | |
| | LGYLFIRALVIPTKMHPEEWYDKLGKFKLRKKSEHALPSDPDAMT | |
| | GETAKFELETDQGEKIELTKNELLQTEFGCKLLESLDKKQLSVDE | |
| | FLEKVARQDEERQKEKRDALKKLYSPFLNT | |
| 8220 | GTANELPLLEQALSDDRLLAGWERVRANAGGPGVDGVTVEQFGGK | A0A3N4U3Z7_9 |
| | VLRALAGLRQRVTASHYQALPLRRIEITRPGKAPRVLAVPCVADR | BURK |
| | VVQSAVALTISPRLDPGFEDFSFGYRPGRSVPRAVQHLAEARDSG | |
| | LVWVAEADIQSCFDRIPWAALLQRLGEVLPDAGLLALIQHWLSLP | |
| | LQWPDGHQQVRCMGVPQGSPLSPLLSNVFLDGMDKELAAGPWRVI | |
| | RYADDFVIAAASREEARRGLAQAARWLRRLGLRLNLDKTRVIHFD | |
| | QGFSFLGVRFRGRQMSAVQPGAEPWVLPRATQPRPHSPSSKPAQH | |
| | SRSPAPTARASAPATPPSAQPEPLGPAAPSPNAAASAQPSQPRAA | |
| | DATLQDLQRLSVAPPNEPSPPRLRT | |
| 8221 | STLPTPSSTDQDSPPPFWTLARLAEALEHVSARQGGAGADEQTLA | A0A080MH79_ |
| | EFAADAEAQLGLLALQLTQGSYRPAPARLIPVAKPGGGVRELLLP | 9PROT |
| | AVRDRIVQSALARYLADLLEPDFGEASHAYRPGHSVATALHRLQA | |
| | LRDGGLVFVAVCDIHHFFDSVDHRRLFSLLDDLPLERRLREQMKT | |
| | CVRIEVADVQGQGAWSLARGLAQGSPLSPVLANLFLMAFDAACAR | |
| | AGLALVRYADDCVLACASETEAQSALAFAADALENIGLALNTRKS | |
| | RLASFAEGFEFLGAFCGAEGMLGGRPGEAACLPPTTGPVHEAAAA | |
| | DDERPPSHGHRPRLR | |
| 8221 | STLPTPSSTDQDSPPPFWTLARLAEALEHVSARQGGAGADEQTLA | A0A080MH79 |
| | EFAADAEAQLGLLALQLTQGSYRPAPARLIPVAKPGGGVRELLLP | 9PROT |
| | AVRDRIVQSALARYLADLLEPDFGEASHAYRPGHSVATALHRLQA | |
| | LRDGGLVFVAVCDIHHFFDSVDHRRLFSLLDDLPLERRLREQMKT | |
| | CVRIEVADVQGQGAWSLARGLAQGSPLSPVLANLFLMAFDAACAR | |
| | AGLALVRYADDCVLACASETEAQSALAFAADALENIGLALNTRKS | |
| | RLASFAEGFEFLGAFCGAEGMLGGRPGEAACLPPTTGPVHEAAAA | |
| | DDERPPSHGHRPRLR | |
| 8362 | LYVEQLATAWHLVQRGSRAAGIDGITVDLFTGIAREQIHQLYRQM | A0A1Z3HGW6 |
| | RQERYVARPAKGFYLAKQKGGHRLIGIPTVRDRIVQRYLLQSIYP | |
| | SLENAFSDAVFAYRPGLSIYAAVKRVMERYRYQPTWVIKADIQQF | |
| | FDQLSWPLLLHQLDQLSLPATWVQWIEQQLKAGIVVSGQFYQPGQ | |
| | GVLPGSILSGALANLYLNDFDRHCLEADIPLVRYGDDCVAVCQSY | |
| | LEASRSLALMQDWIEGLSLSFHPEKTTIIPPGQAFVFLGHRFRNG | |
| | TVEGPARQKAEGRRQKAPQPGYGPPQLCSIVKSPRRMLATSTDDY | |
| | WRDGMTTKL | |
| 8363 | FTQEHLHFAWLQVCAGSKTAGVDGISVELFESMATEQLQNLVYQL | K9QDL5_9NOS |
| | NNETYTASPAKGFYIPKKNGDKRLVGIPTVRDRIIQRLLLDELYF | O |
| | PLEGTFLDCSYAYRPGHNILQAVQHLYGYYQYQPKWIIKADVADF | |
| | FDNLSWALLLTFLEKLSLEPSVLQLIEQQLQSGMIIAGQYRNFGK | |
| | GVLQGGILSGALANLYLTNFDKKCLSQGINLVRYGDDFVIACNSW | |
| | QEANRILDKITVWLGEVYLTLQSEKTQIFTPNDEFTFLGYRFAGG | |
| | EVYAPPPPKPVLKGEWVINDSGNPYFRTKPRPKKPVSHPPKACSI | |
| | DKPINFPRASLSHYWQETMTT | |
| 8249 | ETSVRHLGELTYPLRASAAFQRQALTGEPDLLTEIAAPDSLLNAW | A0A1Q5PUX9 |
| | RYVFTRDAKDGYLLQQSQQIAADPDRFVAALSGALLSGRYQPEPQ | |
| | VEVLIPKKGKTSAMRELSIPSIRDRVVERAVLNAIIDRADLLQCS | |
| | ASFAFRRGLGVQAATHEITQLRDSGNRYVLLTDIANYFGRINIAD | |
| | SLRVLQRGLFCSRTLALLRFIAKPRRVVGRRRIRSRGLAQGSCLS | |
| | PLLANLALTDIDFALADTGVGYVRFADDILLCAPSRTELAASQRL | |
| | LASLAAHQGLQLNEEKTMHTSFDAGFCYLGVDFTAHQPVTDLHYG | |
| | VKHTKQPAKV | |
| 8249 | ETSVRHLGELTYPLRASAAFQRQALTGEPDLLTEIAAPDSLLNAW | A0A1Q5PUX9 |
| | RYVFTRDAKDGYLLQQSQQIAADPDRFVAALSGALLSGRYQPEPQ | |
| | VEVLIPKKGKTSAMRELSIPSIRDRVVERAVLNAIIDRADLLQCS | |
| | ASFAFRRGLGVQAATHEITQLRDSGNRYVLLTDIANYFGRINIAD | |
| | SLRVLQRGLFCSRTLALLRFIAKPRRVVGRRRIRSRGLAQGSCLS | |
| | PLLANLALTDIDFALADTGVGYVRFADDILLCAPSRTELAASQRL | |
| | LASLAAHQGLQLNEEKTMHTSFDAGFCYLGVDFTAHQPVTDLHYG | |
| | VKHTKQPAKV | |
| 8364 | IETRREVEAFEANSQSNLKRIADQLLHRKFIFPAAKGVPIQKAKG | >BIMetSil55537 |
| | KRGDIRPLVVAKVEARIVQRAIHDVLIEVPSIRRYVRTPYSFGGV | 2322\| |
| | RKEKDDSVSAVPAAIDAAMAAIGDGFSYYIRSDITAFFTKIPKSA | [Methylocella |
| | VAALVSDAVGHQSEFMDLFRRAIHVELENMARLARTVNAFPIYDI | silvestrisBL2] |
| | GVAQGNSLSPLLGNILLYDFDQQMNGNPDAVCLRYIDDFIIFAKT | |
| | QQLAENMFQKAIHILASHGMSVAKHKTVKGLVRDKFEFLGIEF | |
| 8365 | PTIRTEIEQFSLSLEKNLRRIADQLREKRYVFSQSYGVAVKKKNN | >DS_gi\|8270206 |
| | PSKKRPIVISPIPNRIVQRALLDVVQEIPSVRAKLDSGFNFGGIA | 3\|ref\| |
| | EIGVPQAILKAYKTALEKPYFIRTDICAFFDNIPRSQALEIITSA | YP_411629.1 |
| | SKDDDFNTLLTQATTTELSNLITLGRDKELFPLEGKGVAQGSCLS | [Nitrosospira |
| | PVLCNLLLDDFDKKMNARGIVCIRYIDDFILFAPSESKAFKAFAS | multiformis |
| | ASAFLEKLNLSVYDPRHSPDKAEHGVSNKGFEFLGCSV | ATCC25196] |
| 8366 | SSDEIKRDAEEFESRLPDSLVEIQRSLSKQTFTFLQQTGVAQKKP | >DS_gi\|7173551 |
| | GGKARPLVLAPIPNRVVQRALLDVLQRRVRFVRKVLDTPTSYGGI | 5\|ref\|YP_277063.1 |
| | PTKRVAMAISDARDAMRNGARFHIRSDIPAFFTKINKDRVQDLLR | [Pseudomonas |
| | SHINCDATLKLLDLAITTDLANIDDLRRQGLNEIFPIGIEGVAQG | syringae |
| | SPLSPLLANIYLADFDVAMNADGITCLRYIDDFLLLGESLSNVDR | pv |
| | AFNRALKTLDKIGLSAYDPRVDKVKASRGSTDKGFDFLGCNV | phaseolicola |
| | | 1448A] |
| 8367 | GIDGVMLSQLKEYLILNWQDIENQLILGTYEPNIVQVYELLSKKG | >PF_WP_05159 |
| | KVREIYKFTIIDNFIQKAVSLILQDKLDCLLSDNNYSFRKGKGTI | 2781.1 |
| | DVIRKGLELIEEGYEYIVEIDIKKYFENIDHVLLSKMLFDIIDDK | [Clostridium |
| | VLISLIMKYQNCLIQKDGKIKRKNKGLITGSSISPVISNLYLMDL | saccharogumia] |
| | DRQYLEYNYIRYCDNIYIFINNKDDGLTLINDISKCLKDKYKLEI | |
| | NQNKTSITHYLSKRMLGYYF | |
| 8368 | GIDGLYLSELRDDWNINGERYLSLLRKGKYKPGIVQIYEIVNYTG | >PF_WP_00875 |
| | KRRSISSFNSIDRLVLRCLATSLEKYYDSIFSSSSFAFRPGLGVD | 1399.1 |
| | KAVATFANNLNTGLTRVAIIDIKHYFDSIPIDRLEMILKRIIDDN | [Lachnoanaerobaculum |
| | VLLSLFHNLLYCRISEENVIKTKSKGILQGSPISPFLGNLYLSLL | saburreum] |
| | DTQLESMHVSFCRYCDDIAMFFASFEEAKETYTKVYDILKNDLEM | |
| | DINPQKSGIYEGIKQNYLGYSF | |
| 8369 | EIDGLHLSELRDYWDINGERYLSMLRAGKYKPGIVQIYEIINYTG | >PF_WP_060932241.1 |
| | KRRSISSFNSVDRLILRCLATSLEKYYNSIFSACSFAFRPGLGVD | [Lachnoanaerobaculum |
| | KAVAAFVSNLNKGLDKVVVIDIKHYFDSIPIDRLEMILKRIIDDK | saburreum] |
| | ILLSLFHKFLYCRISEENIIKTKNKGILQGSPISPFLGNLYLSLL | |
| | DTQLESMQIQFCRYCDDITMFFSSFDEAKEAYTKVSNILKNDLEM | |
| | DIHTQKSGIYEGIKQNYLGYNF | |
| 8370 | GIDGIFVKDFEEYWILNGQKILKQVMNGVYMVSPVQLREIIMPTG | >PF_CVI70780.1 |
| | KHRIIAHYTCTDRLITRILAESLQKEVDDSLSEYSYAYRKQRGVI | [Eubacteriaceae |
| | KAVEQAAAYMQAGKIWVLELDIENYFNNINLTLMEEKIREIILDK | bacterium |
| | NLFSLMEQYLRCEVMEEEYTKTYIKDKGLVQGCSLSPVLSNIYLN | CHKCI004] |
| | KLDQQMEKEGLSFCRFGDNINIYFYNKLEAAEWYAKIKAIIENEF | |
| | DLHLNIRKSGIYLGVNRIFLGYSF | |
| 8371 | GLDGVKLSELRAYWETNGKKIKESIFNGTYKVGAVEQRQIVNRKG | >PF_CRL43259.1 |
| | KKRTISLMNSIDRFIFRALYQKMASEWEKQFSQYSYAYQNNKGVL | [Roseburia |
| | TAVEQAAKYMEEGKDWSVELDIQNFFDNINHSIIISKLKAGIEDV | inulinivorans] |
| | RVLDLLIAYLTCTLLDDHAFHQMEQGVLQGGPLSPLLANVYMNEL | |
| | DHYMEKQGYSFGRFGDDINIYCSTYEEATVAFSDVTARMEKIEQL | |
| | PLNHGKTGIFKGINRKYLGYRF | |
| 8372 | GPDTITTDDLKKAGDQFLDKLKNNIVNGNYKQGKTKQYRIPKNDD | >PF_KJR40057. |
| | TFRYIYVLNTTDRLVHKTIADYISPIVDNIISNSAYAYRRGLNTK | 1 [Candidatus |
| | GAANALNNALKEGYTSGIKADISEFFDSINISALSMMIDSLFPFE | Magnetoovum |
| | PLADFINGILENNTRDGIKGILQGSPLSPLLSNLYLTRFDSDMES | chiemensis] |
| | KGFFKLIRYADDFVLLLKTASSYEETIKHVEDSLSTLGLKLKPEK | |
| | TTEITQGKAINFLGYVI | |
| 8373 | GLDGVSVQSFGDQAASHLEDLRQALQAGNYTPEPHQRIKVPKLDG | >PF_WP_01370 |
| | SGELRPLSLPTIKDKIVQEAVRRIIEPLFEPEFLPCSYAYRPGQG | 7702.1 |
| | PRRAIGRAIHYLEHDKCRWAVHADFDKFFDTLDHEVLLRRLQEKI | [Desulfobacca |
| | KELPVLKLVRMWLRTGSIGAKGTYDDADLGVGQGGILSPLLSNIY | acetoxidans] |
| | VHPLDVYLTDKGHRYIRYADNVLILADSQPRGTEGLNDLIYFSQE | |
| | MLKLRLNPEAKPLRHVADGFTFLGIHF | |
| 8374 | GLDGVEIDDQHTDADKMVSALIKELRTGAYVPVPYARGAIPKFDE | >PF_KKO17867.1 |
| | QNQWRKISLPSVRDKVVQQAFVEALGPVFNKTFLDCSYAYREGKG | [Candidatus |
| | PVKAIKRVEHILHTHHIRWVTTMDIDNFFDTMDHDIFIGEFTKKV | Brocadiafulgida] |
| | AEPEILQLVRLWLKAGCISARGDWIEPYDGIAQGAVVSPLFSNIY | |
| | LHPLDCFAIGNNCLYVRYSDNLIVLSETKETLYLWYEQLKSFLED | |
| | RLRLRLNEDPYPFKDKERGFVFLGIFF | |
| 8375 | GLDNVTVESFGNRLDQHISKLQKEIMEHRYVPKPLKSIHVPKYNK | >PF_KHE91657.1 |
| | ENEWRGLALPSVSDKVVQAALLQVVEPLGEKLFMDSSYAYRKGKG | [Candidatus |
| | HYKAIRRVEHCLGNRKKSWVVHRDIDNFFDTLNYDRLIDQFSALV | Scalinduabrodae] |
| | DGEPVMTELVALWCRTGLVEAGGRWRGVQSGIRQGNIISPLLSNL | |
| | YLHPLDEFAARLRIDWVRYCDDYLILCDSRKDAISADRLIKEYLK | |
| | EPLCLKLNNSGLSPCHIDEGFTFLGVSF | |
| 8376 | GLDGITVEEFGHRLDQHITKLQKDIRERRYIPQPAAVTYIPKFNE | >PF_WP_007220853.1 |
| | ENEWRELGLPSVADKVVQAAMLEVVEPLAEKMFLDCSYAYRPGTG | [Candidatus |
| | HYKAIRRVENSLNNRKKTWVVQRDIDNFFDTVDHNRLMEQFSALV | Jetteniacaeni] |
| | QGEPTMVELVALWCRMGLVEKNGRWRNVQAGIRQGGVISPLLANL | |
| | YLHPLDVFATKLGVDWIRYADDYVILGESQEEVVSSDVQIVEFLK | |
| | DSLGLMLNRDESSPKHIDEGFTFLGVRF | |
| 8377 | GVDGVTISSFNANLEVNLSELSNQILTNQYTPEPLQAAHIPKPGK | >PF_KPA10619.1 |
| | SEKRQLGLPSLKDKIVQSSLASILSDFYEIHFSNCSYAYRPGKGS | [Candidatus |
| | VKAIGRVRDFLNRKNYWIASVDIDNFFDSVDHEICTSILKEQISD | Magnetomorums |
| | QSIIRLISLYFSSGMIKFDQWQDTEIGIPQGGAISPVISNIYLNK | p.HK1] |
| | LDHFLHTLNAFFVRYADDIILFSNTQQSLSETYQKTNEFLNKKLN | |
| | LKLNALDNPIINVSKGFSFLGIYF | |
| 8378 | GIDGVSISEFETARDKNLQELSQQILYSQYTPEPLQAVQIPKPGK | >PF_ETR69258.1 |
| | TEKRQLGLPSLKDKIVQSSLASLLSDFYDPLFSNCSYAYRPQKGS | [Candidatus |
| | VRAIGRVKDFLNRKNHWAAPVDIDNFFDTVNHETCISILQDKISD | Magnetoglobus |
| | IDIIRLIRLYFSSGKIQFDKWQDTIIGIPQGGALSPVLSNVYLNE | multicellularis |
| | LDQYLHAIQANFVRYADDIILFANTRQFLLDFYEKTRHFLESKLQ | str. Araruama] |
| | LKLNQTSHPVMSMEKGFAFLGIYF | |
| 8379 | RVSLKREIHLPEKEIENLFRALQNSTYIPEPPQKIELKKHDKIRP | >PF_WP_025270209.1 |
| | ITIASKKDKIVQALLHEYLTELFDSSFSDKSYAYRPNKGPLKAVN | [Hippea |
| | RTFDYIKRGEKYVLKTDIKDFFETIDHSLLICMLKEKIKDDSLID | sp. KM1] |
| | LIMMYIKIGTVKNLEYEDHNLGVHQGNIISPILSNIYLDRMDKFL | |
| | ERHGFNFVRFADDFVVFAKTHDRIELIHRNLKRFLKVYKLGLNEE | |
| | KTYITTTDSGFAFLGAYF | |
| 8380 | GLDNISYIEFKQNFTSQIKELIETILKGTYSPEPLKKIEIQKEDS | >PF_WP_04699 |
| | LEKRPIALSSIKDKLVQRVLYKALNDYFDETFSNKSYAYRKDKST | 6094.1 |
| | LNAINRVGQFIQEQNHFILKTDIDNFFESINHDKLLTILDKHIQD | [Arcobacter |
| | KSIIRLISLFLQIGSFKEFDYFEHEDGVHQGDILSPLLSNIYLDL | butzleri] |
| | MDKWLEKYDIFFVRYADDFVVFSKKEDELKTIKENLEKFLESLDL | |
| | KFGIDKTYFTTIQKGFSFLGVYF | |
| 8381 | GIDNLSELNEHFIHKLKQSCLNQTYVPEPVLQKLIPKSDGENYRK | >PF_CZE46369.1 |
| | LAISSLKDKLIQKVLANELAWYFDKHFSDKSYAYRPGKSYKNAIF | [Campylobacter |
| | RLRDFLRVKPYFVIKSDIKDCFESINHSKLVALLAKYIKDKRVLN | geochelonis] |
| | LVEIWIKNGIFNRQTYIKHSKFGIHQGDVLSPLLANIYLNQMDKF | |
| | LETNNEIFIRYADDFVILADDEKFVQAKINSLKTFLSTIDLSLKD | |
| | TKTAIYSPTQSFEFLGVSF | |
| 8382 | GLDELSMDELCTEAFFAELKDEILNLSYSPQPLKRAFIPKENKDE | >PF_WP_021087740.1 |
| | FRKLAIPSLKDKFTQNILIGELSSYFDKGFSNRSYAYRSGKSYSN | [Campylo |
| | AIFRARDFCLTHDFVLKTDIKDFFENINHEKLLEILRSNIKDTRI | bacterconcisus] |
| | IRLIELWIKNGIFEHFDYTSHTKGVHQGDVLSPLLSNIYLDQMDK | |
| | FLEHSSIEFVRYADDFVLFFGSREACEQALAGLKDFLVTINLSLN | |
| | EAKTSLHDKDSEFTFLGVNF | |
| 8383 | GFDGLSADDICSGEFYAELKSEIFSLSYSPQPLKRAFIPKEAKDE | >PF_WP_005873073.1 |
| | LRKLAVPSLKDKFVQNILTRELSGYFDKSFSNRSYAYRNGKSYAN | [Campylo |
| | AIYRARDFFQIFSFAVKTDIKDFFENIDHEKLLEILRANIRDARI | bactergracilis] |
| | IRLIELWIKNGIFERFDYRAHTKGVHQGDVLSPLLSNIYLNQMDK | |
| | FLENSGVEFVRYADDFVMFFASYEAAEMRLARLKDFLKTISLSLN | |
| | EAKTSIHGKDSEFVFLGVSF | |
| 8384 | GQTIDAFRRDRDRNVTRISDSLKNGTYAPSPLRGVKISKNGGGFR | >W_[Fretibacterium |
| | RLGVPTVKDRIVFQGANRLLADVWDPLFAPLSFAYRSGRSIADAI | fastidiosum] |
| | DAVIERIRKGRVWFVKGDIKGCFDELSWDVLSACLHDWLPDESLR | 479198758 |
| | RLVNQAIRVPVVEGGQIRPRLRGIPQGSPLSPLLANLYLHSFDLQ | |
| | MLQQGFPVIRYADDWLLLVGSEPEAQAALQTAQGILSVLNIAINE | |
| | EKSGIGNLRCESVAFLGHRI | |
| 8385 | LCQVFGVHRSSYRYWKNRPEKPDGRRAVLRSQVLELHGISHGSAG | >DS_fid\|186781 |
| | ARSIATMATRRGYQMGRWLAGRLMKELGLVSCQQPTHRYKRGGHE | 73\|locus\|VBIShi |
| | HVAMPKWVILYCRRWMEAPMQSCENGELITRTRGTPQGGVISPLL | Boy33460_0060\| |
| | ANLFLHYAFDLWMEREYRGVPFERYADDIVVHCSRMSDATRLKNR | [Shigellaboydii |
| | LSERFSEVGLVLNAGKTNIAYIDTFKRRNVATSFTFLGYDF | Sb227] |
| 8386 | GVDGFTVAHFEKKLTDNLTELHHELVTGTWNPEPYLRVEIAKNET | >PF_WP_00748 |
| | EKRKLGLLCIKDKIVQQAIKTAIEPQMDKTFLNISYGYRPGKGAE | 1073.1 |
| | RAIRRTIQELKKLKNGYIAKLDIDNYFDNINQERLFTRLGNWLKD | [Bacteroide |
| | DETLRLIKLCVQTGIVNPQLKWERTTKGIPQGAILSPLLANFYLH | ssalyersiae] |
| | PFDQFAISKAPMYIRYADDFLIASPSEKQTKEAVELIKEELADTF | |
| | YLQLNKPLVCNFHDGVEFLGIIV | |
| 8387 | GIDGFTLSHFEKRLNDNLIELQHELISQTWNPEPYLRIEITKNET | >PF_WP_03255 |
| | EKRKLGLLCIKDKIVQQAIKTAFEPQLEKTFLNLSYGYRPNKGPE | 6864.1 |
| | RAIKRVVHDLKKLKSGYVAKLDIDNYFDTINHERLFTRLANWLKD | [Bacteroides |
| | DETLRLIRLCIQTGIVTPQLQWQEINKGVPQGAILSPLLANFYLH | fragilis] |
| | PFDQFAANKVPMYIRYADDFLIATSTEKQIKEAVELVKEELESQF | |
| | YLQLNTPIIHNFHDGIEFLGITI | |
| 8388 | GVDGKKALEPSQRLALYEVLVKNWKQWKHQPLKRVYIPKADGTRR | >DS_N.sp.I1/BA |
| | GLGIPTISDRAYQCLIKYALEPAAEAMFNARSYGFRPGRSCHDVQ | 000019/ |
| | KLLFSNLNGGQANGLSKRILELDIERCFDKIDHKFLMQSVQLPKA | 6209592 . . . |
| | AKQGIFWAIKAGVRGEFPSSESGTPQGGVISPLLANIVLHGLENV | 6207287/ |
| | GHELRYKVRSGGRQIDTIKGFRYADDVVFLLKPEDNPEALRQNID | Nostoc sp./CL2 |
| | TFLEARGLKVKEAKTKIVHSTDSFDFLGWNF | |
| 8389 | GVDGKASLTYKERVELDKLLMEQVNTWTHSKLREIPIPKKDGTKR | >DS_cianobacteria |
| | ILKVPTIKDRAWQCIIKYTIEPAHEAIFHERSYGFRPGRSTHDAQ | fid\|115549836\|locus |
| | KYLFDNLRSQSHGKDKIILEMDIEKCFDRISHNHLMSQIIAPQSV | \|VBIAnaSp4 |
| | KLGVWKCLKAGVNPEFPEQGTPQGGVCSPLLANIALHGIEAIHKS | 9473_5321 |
| | VRYADDMVFIFKKGDDQAKVFDEITEFLRIRGLNIKTAKTRFVPA | [Anabaena |
| | TTGFNFLGWKF | sp. 90] |
| 8390 | GCGESRTPRFNREVRRIIPPIDSNQCLAKYALEPAHEATFHEHSY | >DS_cianobacteria |
| | GFRPGRSTHDAQSQIANYLASSKGGINKRILELDIEKCFDRINHS | fid\|22782216\| |
| | TIMSNLIAPQGLKQGIFRALKAGINPEFPEQGTPQGGVVSPLLAN | locus\|VBINosSp37 |
| | IALNGIEDLHQYHDCNYKKITPSTPERNIKKACVRYADDMVFFLR | 423_6520\| |
| | PEDDAEEILEKISQFLAQRGLKISEKKTKLTASTDGFDFLGWNF | [Nostoc |
| | | sp. PCC7120] |
| 8391 | GIDGIKSLNFKQRFALAERLLKAHDWKHSKLREIPIPKKDGTTRM | >DS_C.w.I6/NZ |
| | LKVPTMADRAWQCLVKYALEPAHEALFHARSYGFRPGRSTHDAQK | AADV02000041/ |
| | ILFLNLKSDSNGLNKRILELDIEKCFDRINHTSIMERVIAPQTIK | 1584 . . . 4153/ |
| | TGIWRCLKAGVNPEFPEQGTPQGGVVSPLLANVALDGIEDIHYSI | Crocosphaera |
| | RYADDMVVILKPKDDADKILKDIQEFLAARGLKVSEKKTKLVRAT | watsonii/CL2 |
| | EGFDFLGWHF | |
| 8392 | GIDGKKSLTFEERFALEELLKAKSSKWKHQKLRAIPIPKKDGTTT | >DS_cianobacteria |
| | RLLKIPTLADRCWQCLAKYALEPAHEATFHKHSYGFRTGRSAHDA | fid\|115603115\|locus |
| | QKQVFQNLKSSSNGINKRILELDIEKCFDRINHSSIISNLIAPNR | \|VBIRivSp7 |
| | LKLGIFRCLKVGINPDFPEQGTCQGGVVSPLLANIALNGIEELHK | 7222_2588\| |
| | YHTNKGRKIKATTPEKDINTACVRYADDMVFFLRPEDDEKEILDN | [Rivularia |
| | ISQFLAKRGLKVSEKKTKLTASTFGFDFLGWHF | sp. PCC7116] |
| 8393 | GIDGVKSLDFNGRFELEITLKQSSGNWHHQELREIPIPKKDGTTR | >DS_N.sp.I2/ |
| | MLKIPTIADRCWQCLAKYALEPAHEATFHARSYGFRTGRAAHDAQ | BA000020/ |
| | QFLFSNLSSKAKRISKRVIELDIEKCFDRINHSTIMENLIAPKGI | 259212 . . . |
| | KLGIYRCLKAGINPEFPEQGTPQGGVVSPLLANIALNGIESIHRY | 261419/ |
| | HKDNQRITNKTPESDIRYPSVRYADDMVIVLRPQDDANEILAKIE | Nostoc |
| | DFLNARGMKVSAKKTKITATTDGFDFLGWHI | sp./CL2 |
| 8394 | GIDGKKSLTFRERFELSELLKASCNNWKHQGLREIPIPKKDGTTR | >DS_cianobacteria |
| | MLKIPTMADRAWQCLAKYALEPAHEATFHARSYGFRSGRSAHDAQ | fid\|115514952\| |
| | TVLLTHLRSNNNGINKRVIELDIEKCFDRISHTSIMENLIAPKGV | locus\|VBICalSp2 |
| | KLGIFRCLKAGINPEFPEQGTPQGGVVSPLLANIALNGIESIHRY | 27687_3172\| |
| | HRNGSKITNKTAGKDITEPSIRYADDMVIIIRPQDDAQKILADID | [Calothrix |
| | SFLAARGMKVSEKKTKITAATDGFDFLGWHF | sp. PCC6303] |
| 8395 | GIDGKTALTFEQRFQLSEKLRTEANNWKHQGLREIPIPKKDGKTR | >DS_cianobacteria |
| | ILKVPTIADRAYQCLVKYALEPAHEATFHARSYGFRTGRSAQDAQ | fid\|115337801\| |
| | KYLYTNLNSSVNGIEKRVIELDIEKCFDRINHTAIMDRLIAPYSI | locus\|VBIAnaCyl |
| | RLGIFRCLKAGVNPEFPEQGTPQGGVVSPLLANIALNGIESIHRY | 106394_6267 |
| | HIQGLRITNKTKGYKIVEPSVRYADDMIIILRPEDDAKEILDKIS | [Anabaena |
| | RFLAERGMKVSEKKTKLTATTDGFDFLGWHF | cylindrica |
| | | PCC7122] |
| 8396 | GIDGKASLNHEERFALSEELRTRSSKWKHQKLREIPIPKKDGTTR | >DS_cianobacteria |
| | LLKVPTIGDRAWQCLVKLALEPAHEATFHAKSYGFRTGRAAHDAQ | fid\|115430450\| |
| | KYLFDHLRSTSHGIEKRVIELDIEKCFDRIAHKSIMERLIAPSGI | locus\|VBICriEpi2 |
| | KLGIYRCLKAGVNPEFPEQGTPQGGVVSPLLANIALNGIEDIHQS | 39080_1694\| |
| | VRYADDMVFILKPKDDAVAILEQISQFLAERGMKISEKKTKLTAT | [Crinalium |
| | TDGFDFLGWHF | epipsammum |
| | | PCC9333] |
| 8397 | GIDGRASLTFEERLALSEELRAKSNNWKHQKLRSIPIPKKDGSTR | >DS_cianobacteria |
| | LLKIPTIADRAWQCLAKYALEPAHEATFHARSYGFRTGRSAHDAQ | fid\|115683516\| |
| | KFLFLNLSSKAHGISKRVIELDIEKCFDRISHTSIMERLIAPKGI | locus\|VBIOscNig |
| | KTGIFRCLKSGVNPGFPEQGTPQGGVVSPLLANIALNGIEEIHRS | 7962_8018 |
| | VRYADDMVIILKPKDDAKAILDKVSEFLAARGMKVSEKKTKLTAT | [Oscillatoria |
| | TDGFDFLGWHF | nigroviridis |
| | | PCC7112] |
| 8398 | GVDGYTASKPNERIKLYQQLVKCNVFRHRPKPAKRTFIPKKNGKL | >DS_B.me.I2/A |
| | RPLGIPTMRDRVYQNVVKNALEPQWEVKFEPTSYGFRPKRSTHDA | F142677/ |
| | ISNLFNKLNTNSKKKWVFEGDFLGCFDHLNHNWIMEQTSMFPGNT | 34045 . . . |
| | LIKRWLNMGYIEQDMLHTTTEGTPQGGIVSPLLANIALCGMEEEI | 36400/ |
| | GIVYKKTYKSNGGYKIDPKKIGRVLYADDFVIVTETKEQAESMYQ | Bacillus |
| | NLTPYLRKRGITLSKEKTRVTHIEDGFDFLGFSL | megaterium/CL1 |
| 8399 | GIDGYISNTPQERVELFNKLSRYSVRNIKVKPARRTYIPKKNGKL | >DS_Bacillifid\| |
| | RPLGIPVIVDRVYQNAFKNALEPQWEAKFEMTSYGFRPKRSTHDA | 18918903\|locus\| |
| | MSDLFTKLSKGSAKGWIFEGDFEGCFDNLNHDYIMGCINNFPNKS | VBIBacCer120424 |
| | IIRDWLESGYVDNDVFNETTKGTPQGGIISPLLANVALHGMEKEI | _5584\|[Bacillus |
| | GVRYIHTTRQGDTLYSNSVGVVRYADDFVIVCPTEEEAYGMYDKL | cereus |
| | EPYLNKRGLNLAKDKTRVVHISKGFDFLGFNF | Q1] |
| 8400 | GIDGITTNTPEDRVKLFHLLKGYSVRNIKAFPVKRAYIPKKNGKK | >DS_B.a.I1/AE0 |
| | RPLGIPVIKDRIFQNMVKNALEPQWECRFESMSYGFRPKRSAHDA | 11190/ |
| | MANLFLKLSRGTNRAWIFEGDFQGCFDNLNHEHILSCIEGFPYSN | 6579 . . . 9109/ |
| | AINQWLNAGCIDNKTFYKTETGTPQGGIISPLLANIALHGMEKEL | Bacillus |
| | GVRYHFPKRDGAMLYPDSIGIVRYADDFVIVCNSKEEAESMYAKL | anthracis/ |
| | QPYLDKRGLKLAEEKTRVVHITDGFDFLGFNF | CL1 |
| 8401 | GVDGKKSLRPNQRLKLVNELRLKGYKAKALRRVWIPKPGRDEKRG | >DS_C.w.I1/NZ |
| | LGIPTMKDRAMQALVKSALEPYWEAQFEGTSYGFRPGRSAQDAIS | AADV01000039/ |
| | RIFLAIKTNAKYVLDADIAKCFDKINHDYLLSKVDCPHNIKRIIK | 6112 . . . 8597/ |
| | QWLECGVMDKGIFEETDSGTPQGGVISPLLANIALHGMIIDIENH | Crocosphaera |
| | FPRTKRREDGSLKQGYKPKIIRYADDFVILHTDYDVILQCKNLVA | watsonii/CL2 |
| | QWLEKVGLELKPEKTSIRHTLKSIVHNGKTIEPGFDFLGFNI | |
| 8402 | GIDGIKNLPSMQRFNLVDLLKRHRFKASPTRRVWIPKPGKDEKRP | >DS_Tr.e.I2/CP |
| | LGISTMYDRALQALVKLGRSPEWEAHFEPNSYGLRPGRSTHDAIA | 000393/5587083 |
| | AIYVSINKKPKYVLDADISKCFDRINHDALLRKIGRTPYRRLIKQ | . . . 5589603/ |
| | WLKSGVFDNKQFSDTLEGTPQGGVISTLLVNIALHGMEKCLEKYA | Trichodesmium |
| | ETLPGKKRDNKQALSLIRYADDFVILHEDIKVVMQAKTVIQEWLN | erythraeum/CL2 |
| | QVGLELKPEKTKIAHTLEEYEGNKPEFDFLGFNI | |
| 8403 | GIDGVKSLKPSARLTLVMNMKLNHKVKATRRVWIPKPGNVEKRPL | >DS_C.sp. I1/X7 |
| | GIPTMQDRATQSLVKLALEPEWEAKFEPNSYGFRPGRNAHDAREA | 1404/ |
| | IFNSIRYSNKWVLDADISKCFDKINHEKLLTKINTFPTMRRQIKA | 446 . . . 2898/ |
| | WLKAGVLDNGHFSETTEGTPQGGVISPLLANIALHGLEKLVKEFA | Calothrix |
| | ASQRGGKVKNQNSISLIRYADDFVILAPNKTQIIVLKEIVKTWLA | sp./CL2 |
| | EMGLELNPNKTRIVSTFKSSEIFASQEVGFNFLGFNV | |
| 8404 | GVDGRKNLSPKARLILVQSMKLGDKASPTRRVWIPKPGSSGEKRP | >DS_N.sp. I4/AP |
| | LSIPTLYDRALQSLVKLALEPEWEARFEPNSFGFRPGRNAHDAMK | 003604/ |
| | AIFNTIKFKPKYVLDADIAKCFDKIDHNVLLSKLNTFPTISRQIR | 45422 . . . 47908/ |
| | AWLKAGVIDFSEYALHTTSMGVPQGGTISPLLANIALHGMENRIK | Nostoc |
| | QVALTLPGCKSENRQAISLIRFADDFVILHKDLAVIQRCQQIISE | sp./CL2 |
| | WLSELGLELKPSKTRISHTLNMYEGKVGFDFLGFTV | |
| 8405 | GVDGVKSLTPKARLALTKNLRISEKAKPMRRVWIAKPGTQEKRPL | >DS_G.v.I1/BA |
| | GIPTMTDRARQALLTLALEPEWEARFEPNSYGFRPGRSCHDALQA | 000045/ |
| | IYNAIRQQSKFVLDADIAKCFDRIDQQALLKKMNTSSAIRRQIRA | 168850 . . . |
| | WLKAGVMEGSELFPTPTGTPQGGVISPLLANIALHGMEERVKQVS | 171364/ |
| | KMAQLIRYADDFVCIHTDQQIVQSCQTVLEEWLAGMGLELKPSKT | Gloeobacter |
| | RIAHTLLLEEGQPGFDFLGFTV | violaceus/CL2 |
| 8406 | QRCFLSLAKRSSAEWILEGDIRACFDAFDHDWLIEHTPTDQGRLR | >DS_Gfid\|11564 |
| | AWLKSGFMEQRRIFPTERGTAQGGIISPTVANMVLDGLEGRIRAR | 1574\|locus\|VBIT |
| | FKRRGKVNLIRFADDFVITGESRAILENDVTPLVTEFLHERGLVL | hiNit264030_3543\| |
| | APEKTRIVHIDDGFDFLGFRF | [Thioalkalivibrio |
| | | nitratireducens sp. |
| | | DSM14787] |
| 8407 | IDRTQQALHLLALDPISETIADPNSYGFRPNRSTADAIAQCFKCL | >DS_fid\|352979 |
| | CQKRSARWVLEEDLKACFDKIGYQWLIENIQIDKRMLKQWLGSDF | 35\|locus\|VBIXen |
| | IDKGLFYRTAEGTPQGGIISPTLMLLTLAGLEKRVKEVARKTDDR | Bov95754_1334\| |
| | INSIEYADNFVMTGASEDVLLNEVKPQLIDFLRERGLTLSEEKTH | [Xenorhabdus |
| | ITHINDGFDFLGFNL | bovienii |
| | | SS2004] |
| 8408 | GIDGIIWNSDARCMTAVNQLSRKGYHAKPLRRIYIPKKNGKLRPL | >DS_fid\|541836 |
| | GIPCMIDRAQQALHLLALEPISETVADLNSYGFRPNRSAADAIAQ | 25\|locus\|VBIShe |
| | CFKCLCMKRSSQWVLEGDIKACFDKIGHQWLIDNIQLDKRMLKQW | Bal163160_2541\| |
| | LGCGYVDKGLFYKTAEGTPQGGIIPPTLMLLTLAGLEQLVKSIAC | [Shewanella |
| | KTGNSVNFIGYADDFIITGSSKEVLVNEIKPQLIGFLQERGLTLS | baltica OS117] |
| | DDKTHITHIDDGFDFLGFNI | |
| 8409 | GIDGIIWNTDARRMKAVNQLSRKAYIAKPLKRIYIPKKNGKLRPL | >DS_fid\|589338 |
| | GIPCMIDRAQQALHLLALEPVSETLADPNSYGFRPNRSTADAVDQ | 41\|locus\|VBIShe |
| | CFKCLAQKKSAQWVLEGDIKACFDKIGHQWLLDNITVDKRMLEQW | Bal147952_0958 |
| | LKSGFMDKGLFYRTDEGTPQGGVISPSLMLMTLAGLEQHIKSTAL | [Shewanella |
| | KKGTRANFIGYADDFVVTCASKEVLENDIKPLITDFLAERGLTLS | baltica |
| | EEKTHITHINDGFDFLGFNH | OS678] |
| 8410 | GIDGVIWNTDARRIAAVKQLKRKAYQAKPLKRIYIPKKNGKLRPL | >DS_Sh.sp. I1/C |
| | GIPCMIDRAQQALHLLALEPISETVADPNSYGFRPHRSTADAIAQ | P000446/ |
| | CFLCLSQRYSSEWVLEGDIKACFDKIGHQWLIDNIALDKKMLRQW | 2526748 . . . |
| | LECGFMDKGLFYRTDEGTPQGGIISPTLMLLTLSGLEQLLKATAR | 2528903/ |
| | RKGCNVNFIGYADDFVVTGSSKEVLVNEIKPLIARFLAERGLTLS | Shewanella |
| | EEKTHVTHINDGFDFLGFNL | sp./CL1 |
| 8411 | GIDGEKWLSSASKMKAVLSLTGKRYKAKPLKRVFINKPGKTKKRP | >DS_Ms.b.I1/N |
| | LGIPTMYDRAIQSLYSLALEPVAEIKSDLRSFGFRKHRSTKDACQ | Z_AAAR02000002/ |
| | QIFLCLSKKTSAQWILEGDIRGCFDNINHQWLLTNIPIDKAILTQ | 377828 . . . |
| | FLKAGFIYKRHLNPTKAGTPQGGIISPILANMTLDGIEKMLLVKY | 379992/ |
| | PKKGKNSKKVNFIRYADDFIVTANSKETAGEIKDEVVAFLKERGL | Methanosarcina |
| | ELSDDKTFITNINEGFDFLGWNF | barkeri/ |
| | | CL1 |
| 8412 | GVDKELWSTTASKMQAVLSLTDKNYKAKPLRRVYIEKKGKKAKRP | >DS_clostridiafid |
| | LGIPCMYDRAMQALYALALDPVSEVTADTKSFGFRKNRCCQDACE | \|161805880\|locus\| |
| | YIFTALSRENCAKWILEGDIKACFDYISHEWLIENIPMDKSVLKQ | VBICloPas18 |
| | FLKAGFVFENELFPTDDGTPQGGVISPILANMALDGMQKALSDRF | 034_1667 |
| | HTNKLGRVDNRFQIANKVYLVRYADDFIVTAATKEIAEEAKELIR | [Clostridium |
| | EFLQTRGLELSEEKTKITHINDGFDMLGWTF | pasteurianum |
| | | BC1] |
| 8413 | GIDGELWTTPAQKMEALLSLTDKGYKASPLRRVYIDKKGKKKKRP | >DS_Bacillifid\| |
| | LGIPTMYDRAMQALYALALEPIAETTADTKSFGFRKGRSCQDACE | 19653441\|locus\|V |
| | YIFTALSRKASPQWILKGDIKGCFDNISHDWLLENIPMDKSILKQ | BIStrEqu35012 |
| | FLKAGFVFKGELFPTEDGTPQGGIISSILANMALDGLQQVLSDRF | 1915 |
| | HTNRLGRIDFRFKNSHKVNLVRYADDFIVTAATQEIALEAKELIR | [Streptococcus equi |
| | EFLIGRGLELSEEKTLVTHINDGFDLLGWNF | sub sp. |
| | | zooepidemicus] |
| 8414 | GVDGQLWTNPPRKRQAIDELRSRGYRPQPLKRIYIPKRNGKQRPL | >DS_Bacteroidet |
| | SIPTMKDRAMQALHLMALQPVSETTADPCSFGFRPARQVADAVER | esfid\|115626437\| |
| | CFGLLSRQDSPQWVLEADIEACFDRIDHDWLLQHIPMEKTILGQW | locus\|VBIFibAes |
| | LKAGYIEKGNWWPTTEGTPQGGIISPVLANMALDGLAKELAAHFA | 90597_0767\| |
| | KSYKRPDRGFNPKVRLVRYADDFIITGISRQQLEEQVKPVVCNFL | [Fibrella |
| | SKRGLRLSESKTRQTAITEGFDFLGFTF | aestuarina] |
| 8415 | GVDGKIWSTPVAKSTGAQALQHRGYRPQPLRRIYIPKSNGKKRPL | >DS_fid\|199617 |
| | GIPTMRDRAMQALWKLALEPVAETRADPNSYGFRPQRSTADAIAH | 45\|locus\|VBIPse |
| | CENALAKRGSAHWVLEADIRGCFDNISHDWLLTNVPMDKVVLRKW | Stu31643_0668\| |
| | LRAGYVDQGALFATEAGTPQGGIISPVLANWTLDGLEDVVHASVA | [Pseudomonas |
| | STARKRKPFKIHVVRYADDFIITGATKAVLQHQVRPAIEAFLKER | stutzeriA1501] |
| | GLELSDEKTQITHISQGFDFLGQNV | |
| 8416 | GVDGKIWATPAAKSSGMESMRHRSYRALPLRRIYIPKSNGQKRPL | >DS_P.p.12/Y18 |
| | GIPRMLCRSMQALWKLALEPVSESLADPNSYGFRPNRSTADAIEY | 999/ |
| | CFITLAKRTSPVWVLEGDIRGCFDNFNHEWMLKNIPMDKTILRRW | 752 . . . 2957/ |
| | LQAGFIDEGTLFATQAGTPQGGIISPVIANMALDGLEAAVHASVG | Pseudomonas |
| | PTKRARERSKINVVRYADDFVVTGISKEILEHSVLPAVRQFMAIR | putida |
| | GLELSEEKTKITHIAEGFDFLGQNV | /CL1 |
| 8417 | GVDKVVWDTPEKKLCAMGDLKRRGYRPKPLKRVHIPKANGKLRPL | >DS_fid\|423466 |
| | GIPTMKDRAMQALYLLGLLPVSETTADGCSYGFRPERSVADAIER | 03\|locus\|VBIGa |
| | CFNALGRRDAAAWVLEADIKGCFDHISHDWLLGNVPMDKRVLATW | mPro61291_1949\| |
| | LKCGFMEKAVWFATEAGTPQGGIISPTLANFALDGLEQLLSKTFY | [gammaproteo |
| | RTMRHGKMVHPKVHLIRYADDFVITGSSEELLVNEVKPLVERFLA | bacterium |
| | ERGLMLSAEKTKVTHIDEGFDFLGQNV | sp. |
| | | HdN1] |
| 8418 | GVDRVTWSTPETKSEAVLSLRRHGYRPRPLRRIYIPKANGKKRPL | >DS_fid\|211635 |
| | GIPTMRDRAMQALYLLALEPIAETTGDKDSYGFRPGRSVADAIRQ | 95\|locus\|VBIBor |
| | CHTVLAWKRSAEWVLEADIEGCFDNISHDWLAENIPMDKAILKSW | Pet31633_1067\| |
| | LKAGYVESGSLFPTEAGTPQGGIISPVLANMALDGLQEVLGKSFF | [Bordetella |
| | RTRRQNKHYDPKVNFVRYADDFIVTGYSRELLEIEVLPLVEKFLA | petrii |
| | ARGLNISKAKTRVTHISEGFDFLGKNI | DSM128041 |
| 8419 | GVDGKTWSKPGSKMKAIYTLKRRGYKPLPLRRIYIPKSNGKKRPL | >DS_fid\|485791 |
| | GIPTMKDRAMQALYLMALEPVAETTADPNSFGFRPCRSTADAIEQ | 26\|locus\|VBIEsc |
| | CFTTLHRADRAQWILEADIRSCFDEISHEWLIANIPTDTAILKRW | Col159162_5518 |
| | LKAGYIDLGKLYPTSAGTPQGGIISPTLANMVLDGLQPLLKKTFY | [Escherichia coli |
| | RGGLNPEKINIIRYADDFVITGISHDTLSEKVLPLLENFLAERGL | UMNK88] |
| | TLSPEKTRITHISDGFDFLGMNI | |
| 8420 | GVDGITWSTQEQKTQAIKSLRRRGYKPQPLRRVYIPKANGKQRPL | >DS_Th.e.I1/ |
| | GIPTMKDRAMQALYALALEPVAETTADRNSYGFRRGRCTADAAGQ | BA000039/ |
| | CFLALARAKSAEHVLDADISGCFDNISHEWLLANTPLDKGILRKW | 27344 . . . 30566/ |
| | LKSGFVWKQQLFPTHAGTPQGGVISPVLANITLDGMEELLAKHLR | Thermo |
| | GQKVNLIRYADDFVVTGKDEETLEKARNLIQEFLKERGLTLSPEK | Synechococcus |
| | TKIVHIEEGFDFLGWNI | elongatus/ |
| | | CL1 |
| 8421 | GVDGETWSTPESKWKAIFRLQRTGYRPRPLRRVYIPKANGQRRPL | >DS_A.v.I1/AY |
| | GIPTMLDRAMQALYLLALEPVSETTADRNSYGFRPHRSTADAIEQ | 057439/ |
| | LFVNLGRKHSAQWVMEGDIKGCFDNISHDWLIANVPLDKAVLRKW | 1648 . . . 4444/ |
| | LKAGYLESGQLNPTGAGTPQGGIISPVLANLALDGLEKALESRFG | Azotobacter |
| | QRNTKASYKTKVNYVRYADDFVITGISKELLVNEVKPVVAAFMAE | vinelandii/ |
| | RGLSLAAEKSLFTHVSEGFDFLGQNV | CL1 |
| 8422 | GVDGQTWSSPEVKFLAINLLKRRGYKPQPLKRVYIPKSNGKSRPL | >DS_E.c.I5/AF0 |
| | GIPTMKDRAMQALYLLALEPVAEVTADQRSFGFRTGRSTADAIAQ | 74613/ |
| | CFCVLAQKTSAEWVLEGDIRGCFDNISHQWLIDNTSTDRQILTKW | 58241 . . . 60646/ |
| | LKAGYREKGQLFPVNSGTPQGGIISPVLANIALDGLEALLASEFK | Escherichia |
| | KRTVKGRLVNPKVNYVRYADDFIITGESKELLESQVLPVVRRFMA | coli/CL1 |
| | ERGLMLSPEKTKITHIEEGFDFLGQNI | |
| 8423 | GVDGITWSTPEAKSQAMLSIKRRGYRPQPLKRVYIPKTNGKMRPL | >DS_fid\|867388 |
| | GIPTMKDRAMQALYLLALEPVAETTADGRSFGFRPERSTADAIEQ | 73\|locus\|VBIPse |
| | CFTTLSKKVAPQWILEGDIKGCFDNISHDWLMGHVPTDREILRKW | Aer240047_2455 |
| | LKAGYMEDRQLFPTEAGTPQGGIISPTLANLVLDGLEAKLDAAFG | [Pseudomonas |
| | RKRYANGVQTRLMVNYVRYADDFIVTGRSKELLEQEVMPIIKDFM | aeruginosaDK2] |
| | QERGLTLSPEKTKITHIDDGFDFLGQNV | |
| 8424 | GIDGITKEDYGKKLKANLLSLLTRIRKGQYQAKPARIVKIPKEDG | >DS_fid\|228289 |
| | GKRPLVISCFEDKIIESTVSKILNSVFEPIFLKYSYGFHPKLNAH | 08\|locus\|VBIOri |
| | DALRELNRLTYNFNKGAIVEIDITKCFNTIKHCELMEFLRKRISD | Tsu129072_1468 |
| | KKFLRLVMKLIETPIIENDTIVTNKEGCRQGSIVSPILANVFLHY | [Orientia |
| | VIDSWFAKISEENLIGQTGMVRYCDDMVFVFESEADAKRFYDVLP | tsutsugamushi |
| | KRLNKYGLNINEAKSQMIKSGRDHAAN | str. Ikeda] |
| 8425 | GIDGVTKEVYGKKLEDNLQDLLARIRRHAYTPQASRLVEIPKEDG | >DS_fid\|352902 |
| | STRPLAISCFEDKIVQMAVTKLLTAIYEPLFLPCSYGYREGKNGH | 99\|locus\|VBILeg |
| | EALRALMKYSNEFRKGATLEIDLRKYFNTIPHGKLLEILEKKITD | Lon159544_1142\| |
| | RRFLKLIRKLIRSPVVANGKAELNELGCPQGSIISPILSNIYLHS | [Legionella |
| | VVDSWFDEISKSHLIGKTAMVRFADDMVFLFQRSEDAEKFYKVLP | longbeachae |
| | KRLEKYGLQLHVDKSSLLKSGSKEAEEADTRGERLQTYKFLGFTC | NSW150] |
| 8426 | GIDRMTKAAYGEHLDGNIHNLILRIRRGTYRPKAARITQIPKEDG | >DS_fid\|424648 |
| | SKRPLAISCTEDKLVQLAVSDILSRIYEPLFLPCSYGFRPGLNCH | 02\|locus\|VBIXen |
| | AALKALQQQTYRNWNGAVVEIDIRKYFNTIPHIELMSLLRKKISD | Nem38452_2364 |
| | RRFLRLIEVLITAPVIEGKQVSENVRGCPQGSILSPVLANIYLHQ | [Xenorhabdus |
| | VIDEWFDEISRSHIHGRAEMVRYADDRVFTFEFMSEAERFYKVLP | nematophila |
| | KRLNKYGLELHDDKSQRIPAGHIAALRASQSGRRLPTFNFLGFTC | ATCC19061] |
| 8427 | GVDGVTKAEYQENLETNLQNLHLKLRQMSYRPQPVRQVEIPKEDG | >DS_Ac.ma.I1/C |
| | SMRPLGISCTEDKVVQEMTRRILEAIYEPVFIDTSYGFRPKRSCH | P000840.1/ |
| | DALRQLNREVMRKPVNWVADIDLAKFFDTMPHQEILSVLSIRIKD | 228971 . . . 230873/ |
| | GNLLRLIARMLKAGIQTPGGVVYDELGSPQGSIVSPVIANIFLDY | Acaryochloris |
| | VLDQWFTNVVRHHCRGYCAIIRYADDVAAVFEHEEDAIRFMRVLP | marina/BacterialE |
| | RRLEKYGLRLNTKKTHLLAFGKRNARRCFQTGQRPSTFDFLGLTH | |
| 8428 | GIDRQTAKDYEANLEVNLKSLLERIKSGRYKAPPVRRTYIPKADG | >DS_fid\|426856 |
| | SQRPLGIPTFEDKVAQRAIVLLLEPIYEQDFRPFSFGFRPGRSAH | 79\|locus\|VBISti |
| | QALRELRSSILERNGRWVLDVDLRRYFDTIEHGKLREVLARRVAD | Aur4371220374 |
| | GVVRRMIDKWLKAGVLEEGPLLRLEQGTPQGGVISPLLANVYLHY | 7_3158\| |
| | VLDEWYEREVVPRMKGKCSLIRYADDLVMVFEDFLDCRRVLEVLG | [Stigmatella |
| | KRLAKYGLTLHPGKTRMVDFRFKRPGGGQHPATQATTFDFLGFTH | aurantiaca |
| | | DW4/31(Prj: |
| | | 54333)] |
| 8429 | GIDGRTADDYEKDLEANLESLRIRMMSGSYRAPPVRRHYIPKADG | >DS_fid\|190138 |
| | SRRPLGIPTIEDKVAQRAIVMLLEPIYEEDFLDCSFGFRPERSAH | 491\|locus\|VBIRh |
| | DAIRTLRDGIMDTGQRWVIDADISKYFDSIDHGHLRSFLDLRIRD | iEt1298076_5694 |
| | GVIRRMIDKWLNAGVLDQGTSSRSVAGTPQGGVISPLLANILLLH | [Rhizobium etli |
| | VLDRWFVEVVKPRLKRRCQMVRYADDFVMSFEDHLDGRRMLAVLG | bv.mimosae |
| | KRFERYGLRLHPDKTRYVDFRFRRPHG | str. Mim1] |
| 8430 | GVDEETWIDYHKQRETRIPQLLAAFKSGNYRAPNIRRVYIPKDKG | >DS_Bacteroidet |
| | KLRPLGLPTVEDKVLQTAVTRVLRPVYEDIFYHSSYGFRPGKSQH | esfid\|61290805\|locus |
| | QALEELTRQVSLEGKRYIIDADMQNYFGSINHQCLRDLLDLRIKD | \|VBINiaKor |
| | GVIRKMIDKWLKAGILDNGQLVYPTEGTPQGGSISPLISNVYLHY | 154066_6177\| |
| | VLDEWFYQQIRPLLKGDSFLIRFADDFLLGFTNKEDALRVMHVLP | [Niastella |
| | KRLGKYGLMLHPEKTKLIDLTTKKGGPDQEKNTFDFLGFCH | koreensis |
| | | GR2010] |
| 8431 | GVDGITKEQYGQDLEHNVRDLHARMKSMRYRHQPIRRVHIPKERG | >DS_fid\|236591 |
| | KTRPIGISCTEDKIVQAAVREMLEVIYEPVFRDVSYGFRPGRSAH | 27\|locus\|VBISor |
| | DALRALNRMLLGGVEWILEADIESFFDSIDRTKLMEMLQARVADK | Cel80414_0791\| |
| | SLLRLVGKCLHVGVLDGAEFYAPEDGTVQGSVLSPLLGNVYLHHV | [Sorangium |
| | LDLWIEREVQPRLVGKATLIRYADDFIIGFEREDDAKRVTEVLPR | cellulosum |
| | RFERYGLKLHPDKTRLLPFGRPDNGQPGGKGPATFDFLGFTH | Soce56] |
| 8432 | GTDGKSWKTYEAQLEERLPKLHEEIHTGSYRAQPVKRVYIPKTDG | >DS_Chlorobifid |
| | QKRPLGITAIEDKLVQQAVVTVLNQIYETEFYGFSYGYRPGRAPE | \|21392973\|locus\| |
| | NALDALATAILKRPINWILDADLQKFFDSIPHDKLMALISIRVGD | VBIChlPha1221 |
| | KRILRLIGKWLKTGYIEDGKRYRQTEGTPQGSVISPLLANIYLHY | 04_2646 |
| | VVDEWVEQERRRRNNGEVIIIRYADDLVLGFQYKTEAERYLEALS | [Chlorobium |
| | ERVQTYGLKLHPEKTSLKEFGRYAEERRRKRGEE | phaeo |
| | | bacteroides |
| | | DSM266] |
| 8433 | YGEELDARLLDLQDRILRGSYHPQPVRRVHIPKGSGTRPLGIPAL | >DS_fid\|236778 |
| | EDKIVQQAVRRGLELIYESMFLGFSYGFRPRRSTHDALDALAVAI | 55\|locus\|VBISor |
| | GKRKVNWIVDADIRAFYDTIAHAWMQRFIEHRIGDRRLVRLLMKW | Cel80414_10115\| |
| | LHAGVMEDGVLHEVDEGTPQGGIISPLMANIYLHYVLDLWAHAWR | [Sorangium |
| | KRHARGEVYIVRYADDVVMGFEDGRDARSMRAALSKRLASFGLEL | cellulosum |
| | HPDKTRVLFFGRYAYEKCERRGLRKPATFDFLGFTH | Soce56] |
| 8434 | GVDGVTWQSYEVGLGSNLRDLHRRVHTGSYRALPVLRRYIPKADA | >DS_Bfid\|45180 |
| | GLRPLGVAALEDKLVQSVMVEVLNAIYEEDFLGFSYGFRPGRNQH | 964\|locus\|VBIBu |
| | DALDALAAAIQWRPVNWILDADIRSFFDTVNRQWLIRFVKHRVAD | rRhi170666_033 |
| | PRVIRLIGKWLDAGVLDNGRLMSVQAGTPQGSVICPLLANIYLHY | 1\|[Para |
| | VFDLWIERWRRQRARGTVVVSRYADDTVVGCQHEADALRLMKELR | Burkholderia |
| | QRMEEFDLTLHPEKTRVLEFGRYAAERRRRKGMGKPQTFAYLGFT | rhizoxinica |
| | H | HKI454] |
| 8435 | GVDEMTWRKYKEGSPGRIADLNERVHTGSYRAKPVRRSYINKSDG | >DS_UB.I1/AY |
| | RKRPLGVTALEDKIVQQAVSTILNQIYETDFMGFSYGFREKRSQH | 691909/ |
| | NALDALYIGISRRKINYILDADISGFFDKINHDWLLKFLEHRVAD | 2430 . . . 4342/ |
| | RKILRLIKKWLKVGVIEDGKRTSLEVGTPQGSVISPVLANVYLHY | uncultured_ |
| | AQDLWAHQWRKRHADGDVIIVRYADDSVVGFQYRKDADRFLKDLI | bacterium/Bacterial |
| | ERMGQFGLELHPVKTRLIEFGRFAVVNRRKRGERKPETFDFLGFT | E1 |
| | H | |
| 8436 | GVDGMSWREYEEDLHQRVGKLHARLHRGAYRATPSRRVYIPKADG | >DS_A.v.I5/CPO |
| | RQRPLGIASLEDKIVQQAVVTVLNAIYEEDFQGFSYGFRPGRSQH | 01157/ |
| | DALDALTVALKSQKVNWILDADITSFFDEIDHEWMLMFLGHRIAD | 2471407 . . . |
| | RRMLGLICKWLQAGVMEDGRRLAATKGTPQGAVISPLLANIYLHY | 2473316/Azotobacter |
| | VLDLWARQWRQRHARGEMIVVRYADDSVVGFRTQWQAQRFLVQLQ | vinelandii/ |
| | ERMARFGLSLNASKTRLIEFGRFAVQNRRRQGLGKPETFDFLGFT | BacterialE1 |
| | H | |
| 8437 | GVDGMTWQDYEEDLEPRLADLHKRVQRGTYRPQPSRRTYIPKADG | >DS_B.j.I2/BA0 |
| | KQRPLAIAALEDKIVQGATVIVLNAIYEGDFCGFSYGFRPGRGPH | 00040/ |
| | DALDALCTAIETRQVNWIIDADIQNFFGAVSQPWLVRFLEHRIGD | 2069342 . . . |
| | KRIIRLIQKWLKAGILEDGVVTADDRGTGQGPVISPLLGNIYLHY | 2071253/ |
| | ALDLWAKRWRQREVSGGMIIVRYADDVVVGFEREDDARRFLDAMR | Bradyrhizobium |
| | ARLEEFELTLHPAKTRLIEFGRHAAAQRKQRGLGKPETFAFMGFT | japonicum/ |
| | F | BacterialE1 |
| 8438 | GVDGVTWHDYEQDLDRNLEDLHGRLRRQAYRALPSRRRYIPKADG | >DS_Bfid\|19071 |
| | KQRPLGIAALEDKIVQRALVAVLNAVYEMDFLGFSYGFRPQRSQH | 807\|locus\|VBIBur |
| | DALDALATGIARTSVSWILDADISRFFDTVDHDWLIRFVEHRIGD | Cen118154_0098\| |
| | QRVIRLIRKWLKAGAMEDGVIEPTDEGTPQGSVISPLLANIYLHY | [Burkholderia |
| | VFDLWANQWRKRHAEGNVVIVRYADDVVVGFDKPHDAKRFRRAMQ | cenocepacia |
| | QRLEQFGLSVHPEKTRLIEFGRFAARNRASRGLGKPETFNFLGFT | J2315] |
| | H | |
| 8439 | GVDGIRWMDYAGNMKNNITDLHRRLHQGSYRAQPGRRHYIPKADG | >DS_S.ma.I1/B |
| | KQRPLGIASLEDKIVQYALVKILNAVYENDFMGFSYGFRPGRSQH | X664015/172056 |
| | DALDALATGLVRTNVNWVLDADISQFFDRVSHEWLIRFTEHRIGD | . . . 173964/ |
| | RRVIRLIRKWLTAGTSEEGQWRATEEGTPQGAVISPLLANIYLHY | Serratia |
| | VFDLWAHQWRRRYATGNVVMVRYADDIVIGFDKRYDARRFRIAMQ | marcescens/ |
| | RRLREFGLTVHPEKTRLMEFGRFAAENRAIRGKGKPETFNFLGFT | BacterialE1 |
| | H | |
| 8440 | GVDGITWKDYGEGLEENLADLHRRIHTGAYRAQPSRRKYIPKANG | >DS_Ch.ph.I2/C |
| | QQRPLGIAALEDKIVQRAVVAILTPIYEAEFLGFSYGFRPGRSQH | P000492/ |
| | DALDALAYGIKVKKIGWVLDADISRFFDTISHEWMIRFLEHRIGD | 3012641 . . . 3014550/ |
| | KRIVRLIIKWLKAGVLEDSVRIEAEEGTPQGAVISPLLANIYLHY | Chlorobium |
| | AYDLWAKQWREKHCKGDMIVVRFADDSVAGFQNKEDGERFLADLK | phaeobacteroides/ |
| | ERLAKFALTLHPEKTRLIEFGRYAAKNRQRRGQGRPETFDFLGFT | BacterialE1 |
| | H | |
| 8441 | GVDGVTWEQYAGNLEANVRDLHTRLHRGAYRARPSRRAYIPKADG | >DS_fid\|426823 |
| | RQRPLGIAALEDKLVQRAVVEVLNAVYETDFLGFSYGFRPGRSQH | 69\|locus\|VBISti |
| | QALDALSAGIYLKKVNWVLDADIRGFFDAIDHGWMQKFLEHRIED | Aur4371220374 |
| | TRLLRLVQKWLAAGVMEDGKWTQSKEGTPQGATVSPLLANLYLHY | 7_1515\| |
| | VFDLWSQRWRKRVARGEVIIVRYADDFVVGFQHRSDAERFWRELR | [Stigmatella |
| | ERLRSFALELHPEKTRLIEFGLYVAERRRERDQGRPETFNFLGFT | aurantiaca |
| | H | DW4/31(Prj: |
| | | 54333)] |
| 8442 | GVDGVTWTDYGQDLEANLQDLHVRVQSGCYRATPSRRAYIPKADG | >DS_Fr.sp. I4/CP |
| | RLRPLGIASLEDKIVQRAVVEVLGAVYEVDFRGFSYGFRPGRGPH | 000820/1651830 |
| | DALDALAVGIWRKRVNWVLDADIRDFFGQIDHSWLRRFLEHRIAD | . . . 1653736/ |
| | KRVLRLIDKWLAAGVVEDGEWTACEEGSPQGASVSPLLANVYLHY | Frankia sp. |
| | VLDLWVDWWRRRHARGDVIVVRWADDFIVGFEYEEDARRFLDELR | /BacterialE1 |
| | ERFAKFGLELHPDKTRLIEFGRYAARDRKRRGLGKPETFDFLGFT | |
| | H | |
| 8443 | GVDEITKKEYERNLEQNIDDLVERLKRKSYKPQPSIRVYIPKSNG | >DS_Co.ca.I1/F |
| | KLRPLGIACYEDKIVQLALKKILEAIYEPRFLNCMYGFRPNRGCH | P929038.1/ |
| | NAIKELYKRLNNTKICYIVDADIKGFFDHMKHEWIIKFLKLYIKD | 3172164 . . . |
| | PNIIGLVKKYLKVGVMDNGELMVNEEGSAQGNIISPILANIYMHN | 3174036/ |
| | VLTLWYKFIITKECKGDNFLIAYADDFVAGFQCKWEAENYYKLLK | Coprococcuscatus/ |
| | ERMEKFGLQLEDSKSRLLQSGAYIARAKQKSGECIRLQTFDFLGF | BacterialE |
| | TF | |
| 8444 | GIDRVTKVEYGANLEENISGLVIRLKNKSYKPLPVLRVFISKGNG | >DS_clostridiafi |
| | KMRPLGIAAYEDKFVQLAIKKILEAIYEPRFLENMYGFRPRRGCH | d\|58517021\|locus |
| | NAIKAAYDRIYENKINYIVDADIKGFFDNMSHEWIMKFLGVYISD | \|VBICloBot1808 |
| | PNFLWLINKYLKAGVMTDGTLIDSISGSAQGSIISPVIANVYMHN | 36_2089\| |
| | VLMLWYKFIVLNGIKGKSFLVTYADDFIAGFQYKWEAEKYYIELK | [Clostridium |
| | RRMAKENLELEDSKSRLLEFGRFAEGNRKARGEGKPETFDFLGFT | botulinum |
| | F | H04402065] |
| 8445 | GIDGITMPAYQQQLVGNITRLSDALKHKRFRANDIKRVFIPKANG | >DS_Ps.tu.I1/A |
| | KQRPLGLPTVDDKLVQQGVSQILQSIWEADFLPNSYGYRPNKSAH | AOH01000003/ |
| | QALHSLALNLQFKGYGYIVEADIKGFFNNLDHNWLMKMLKQRIDD | 353461 . . . 355380/ |
| | KAMLSLISQWLKARIKSPEGVFEYPKSGTPQGGIISPVLANIYLH | Pseudoalteromonas |
| | YALDLWFEKKVKPRMRGRAMLIRYADDFVCAFQYANDAERFYEVL | vtunicata/ |
| | PKRLKKFNLEVAEEKTSLLRFSRFHPSRKRQFVFLGFAF | BacterialE2 |
| 8446 | GVDKVTAKEFAEELKQNIENLAEHLEKKRYRAKLLRRVDIPKGEG | >DS_clostridiafi |
| | KTRPLGIPAIADKLVQSAAAKILEAIYEQDFLASSYGYRPKVSAH | d\|115615051\|locus\| |
| | TAIKDLSKELNYGDYSYIVEADIKGFFQNIDHAWLIRMLEQRIDD | VBIDehSp22 |
| | KAFVGLIKKWLKAGILKQDGEVEHPITGSPQGGIISPILANTYLH | 8777_0955 |
| | YVLDLWFEKIVKPNCEGEAYLCRYCDDFVCAFQYKGDADKFYRSL | [Dehalobacter |
| | PKRLEKFGLELAVDKTQIIQFNRWLRKQSSSFEYLGFEF | sp. CF] |
| 8447 | ERLKTKRYRTKLVRRCYIPKENGQERALGIPALEDKLVQLACAKL | >DS_fid\|115643 |
| | LTAIYEQDFLPVSYGYRPGRDAKEAVGDLGFNLQYGRFGHVVEAD | 628\|locus\|VBITh |
| | IQGFFDHLDHDWLLRMLALRIDDRAFLHLIRKWLKAGILDTDGQV | iNit264030_1141\| |
| | LHPDAGTPQGGIVSPILANVYLHYALDLWFERVVRPRCRGQALLI | [Thioalkali |
| | RYADDYVCAFQYREEAEGFYRVLPKRLAKFGLAVAPEKTRILRFS | vibrio |
| | RFHPGLPRRFAFLGFEL | nitratireducens |
| | | DSM14787] |
| 8448 | GIDWVTVEAYGENLKERLEGLVDSMKGKQYQPQPVRRVYIPKAGS | >DS_fid\|240262 |
| | KEKRGLGIPSTEDKLVQIMLKKILENIYEANFLDSSYGFRPGRNC | 34\|locus\|VBIWol |
| | HQTVNALDKAVMYKPINYIVEVDIKKFYDNIQHKWLMRCLRERIT | End95846_0368\| |
| | DPNLLWLIKRFLKAGIVEAGYYEATKQGTPQGGIVSPVLANIYLH | [Wolbachiaendos |
| | YVLDLWLEKKFKPRSRGYIQLIRFCDDFVVCCESKVDAEEFLELL | ymbiont of |
| | KQRLNKFGLEVSENKTRVVKFGKREWQQ | Culex |
| | | quinquefasciatus |
| | | Pel] |
| 8449 | GIDGISKEQYGANLDENIKELSSRLRNMGYRPQPKRRTYIPKPGS | >DS_fid\|115349 |
| | VKGRPLAISCFEDKLVELAIKRVLEPIYEVQFEDSSYGYRPGRSQ | 385\|locus\|VBITh |
| | HQCLDDLGRTIQQSRINTIVEADIRSFFNTVDHAWMLKFLGHRIG | iMob160332_04 |
| | DPRIIRLIGCLLKGGILEDGLVQASEEGTPQGSILSPLLSNIYLH | 42\| |
| | YVLDLWFSRRVRPQCRGEAYYFRFADDFVAGFQYRQEAEQFQTAL | [Thioflavicoccus |
| | GERLGQFKLRLAEEKTRCLAFGRFARSNAQKQGQKPGEFTFLGFT | mobilis |
| | H | 8321] |
| 8450 | GIDGVTVGEYAKALDENIADLVARLKAKQYKPQPVLRVYIPKPNG | >DS_UA.I7/FP5 |
| | EKRPLGIPAVEDKIVQMALKKILEAIFEQDFIDTSYGFRPNRSCH | 65147.1/ |
| | DALTELDRIIMNVPVNFVVDMDISKFFDTVDHKRLMECLRQRIVD | 1619711 . . . |
| | PTLLQLIGRFLKSGIMEEGKYSEMDQGTPQGGVLSPVLANVYLHY | 1621718/ |
| | VLDKWFENEVLPQLTGFAQLIRYADDFVVCFEKETEARAFGVALR | uncultured_ |
| | RRMGKFGLTISEEKSKIIEFGRCTCTRAKRYGRKCETFDFLGFTH | archaeon/ |
| | | BacterialE2 |
| 8451 | GVDGVTWRKYEENLDENTEDLVTRLIAKQYRPQPVKRAYIPKSNG | >DS_UA.I6/FP5 |
| | ERRPLGIPALEDKIVQLAIKKILEAIFEEDFCDVSYGFRPNRSCH | 65147.1/ |
| | DALDMVDMIIMTKPVSYVVDMDIAKFFDTVDHECLMECLKQRVVD | 2174432 . . . |
| | PSLLRIIARCLKSGVMEEGKYLETDKGTPQGGILSPILANIYLHY | 2176370/ |
| | ALDLWFEKEVKEQLKGFAQLIRYADDFIVCFQHDDEARAFGKTLR | uncultured_ |
| | ERLAKFGLTISEEKSRIIKFGRYACQQARKQSKKCATFDFLGFTL | archaeon/ |
| | | BacterialE2 |
| 8452 | GIDDVTKQEYSKELDNNIENLIVKLRNHSYKPQAVKRVYIPKGDG | >DS_Cl.be.I3/C |
| | KTRPLGIPSYEDKLVQMALNKILQSIYEAEFKDFSYGFRPKRNCH | P000721/ |
| | SAIKALNKVIENGRINYVVDADIKGFFNNVNHEWMIKFLEVRIGD | 3718265 . . . |
| | PNIISLVKKFLKAGLMDNGIIKTTEIGTPQGSIVSPTLANIYLHY | 3720149/ |
| | SLDLWFEKVIKRNFRGQSEITRYADDFVCCFQYESEARQFCRLLV | Clostridium |
| | SRLNKENLEVERTKSKLILFGRFAEEIRKSRGFKNAETFDFLGFT | beijerinckii/ |
| | H | BacterialE2 |
| 8453 | GVDKVTWEEYDVNVDENVETLIAKMKRFSYRPQPARRVYIPKANG | >DS_Ta.sp. I2/C |
| | KLRPLGIPCYEDKLVAAVMADILNEVYENIFLDTSYGFRPGRSCH | P000923.1/1286 |
| | DAIKELNRIIGRCKISYVLEADIKGFFDNVDQKQLMEFIAHDIDD | 631 . . . 1288551/ |
| | KNFSRYIVRFLKSGIMEEGKYHESDKGTAQGSPLSPILANIYLHY | Thermoanaerobacter |
| | TLDVWFAYLKRNGKFRGEAYIVRYADDFVMLFQYKSDADKMYEAL | sp./BacterialE |
| | PKRMAKFGLELAMDKTKILPFGRFAKQNSKDGKTETFDFLGFTF | |
| 8454 | GIDGETKASYGGNLEENLRNLLEQLKEGSYRPTPVRRKFIPKAGS | >DS_clostridiafi |
| | NKLRPLGIPVLEDKLVQNALVIILESIYEQDFLEDSYGFRPGRSQ | d\|115615774\|locus\| |
| | HDALKDLSRKIGTRKVGYIVDADIRGYFDHVDHEWLLKMLQERIS | VBIDehSp22 |
| | DSKILKLIKRFLKAGVMEEGKLSKTEEGVPQGGSLSPLLGNIYLH | 8777_1721\| |
| | YVLDLWENKIITKQCQGEAYLTRFADDTVACFQYQKDAERFYEAL | [Dehalobacter |
| | KKRLKKENLEIAEEKTRIIEFGRYAQRDVQRRGGRKPETFDFLGI | sp. CF] |
| | TH | |
| 8455 | GVDKVTKEEYETNLENNIDNLLIRMKTFKYRPQPVRRVYIDKSGS | >DS_Cl.be.12_( |
| | NKKRPLGIPAYEDKVVQLAINKILKSIYEQDFIDSSFGFRQNRSC | YP_001310744.1_) |
| | HDALKILNVYLSEKNVNYVVDADIKGFFDNVDHKWLMKFLEHRIA | Clostridium |
| | DKNLLRYIGRFLKTGIMENGKFYKVYEGTPQGGIISPTLANIYLH | beijerinckii |
| | YVLDIWENNFIKKKCKGQAYIVRYADDFVCCFQYEDEAKAFYEAL | NCIMB8052 |
| | KNRLDKFNLQVAEDKTKILYFGKNAYYDRKFKRAKLESYKDRTFD | |
| | FLGFTH | |
| 8456 | GIDGITKEQYGDNLEANIQSLLERLKRKAYRPQPVRRVYIPKPGS | >DS_Mo.th.I1/C |
| | DKKRPLGIPAYEDKIVQLAASKILNAIYEAEFLDMSFGFRPQRGC | P000232.1/ |
| | HDALKLLNYLIVARKVNYIVDADIKGFFDHVNHDWLMKFLGHRIA | 2324936 . . . |
| | DPNFLRFIRRFLKAGIMENGELRDATEGTPQGGIVSPILANIYLH | 2328581/ |
| | YVLDLWFEKAVRKHCRGEAYMVRYADDFICCFQYKHEAEAFYRAL | Moorella |
| | KARLAKFSLSVAEEKTKIIPFGRFATQWCKRMGQNKPDTFDFLGF | thermoacetica/ |
| | TH | BacterialE |
| 8457 | GVDQVTKQAYEENLEANIADLIGRMKRQAYKPQPVRRVYIPKEGS | >DS_Sy.wo.I1/N |
| | NKRRPLGIPSYEDKLVQKGLARILNTIYEQDFLDCSFGFRPGRGC | Z_AAJG01000003 |
| | HDALKVLNHIIERKKVNYIVDADIRGFFDHVDHEWMMKFLELRIA | /20007 . . . 22007 |
| | DPNLLRLIKRFLKAGVMEAGIVYDTPKGTPQGGIVSPILANIYLH | /Syntrophomonas |
| | YVLDLWFEKVVKKRCQGEAYLVRYADDFVCCFQNKSDAEWFYANL | wolfei/ |
| | RERLNKENLEVAEEKTRIIAFGRFADKESKKQGRKKPDTFDFLGF | Bacterial |
| | TH | E2 |
| 8458 | RRQYIPKKNGKLRPLGIPNIEDRIVQQAIVNVLSPKCEEHIFHKW | >DS_clostridiafi |
| | SCGYRPNLGIKRVMQIILWNIETGYNHIYDCDIKGFFDNIPHKKL | d\|54666312\|locus |
| | MKVLTKYIADGTVLDMIWAWLKAGYMEEGKFHPTDSGTPQGGVIS | \|VBIDesCar1680 |
| | PLLANLYLNELDWTLEEHGVRFVRYADDFLLFAKSKEDIERAAEV | 00_0691\| |
| | AKTTLDELGLEVSIEKTRFVDFDKDDFNFVGFSF | [Desulfotomaculum |
| | | carboxydivorans |
| | | CO1SRB] |
| 8459 | GINNNTMDEMSVGRIINLIQLINSGSYKPRPCRRTHIPKDARKPN | >DS_fid\|871144 |
| | GKKRPLGIPTGDDKLIQEVMRMLLEEIYEPVFSDWNYGFRPKRSC | 90\|locus\|VBIEsc |
| | HSALKEIRNSWKGTKWVCDVDIKGYFDNIDHDLLLKFLSKRIADN | Bla78014_3566\| |
| | KFLALLKKFLKAGYLDNWRYFGTHSGTPQGGIISPILANVFLHKL | [Shimwellia |
| | DEFMKNRISEFGKGGRRKPNPIYKRALQNRANRIKWIRQGFGASG | blattae |
| | MPADEQKIQKWRHEADELEKKLRTLSSVIMDDSEFKRMRYVRYAD | DSM4481 |
| | DFLIGVTGSKNEAKKIMKEVVDFVETELHLEISKEKSGIIDPKKG | = NBRC105725] |
| | FTFLGYEI | |
| 8460 | GVDGQTFDGFSPDKVRSIIERLANGTYRPQPARRVYIPKANGQKR | >DS_N.a.I1/AF0 |
| | PLGVPTTEDKLVQEVVRTILEQIYEPLFSRHSHGFRPKRSCHTAL | 79317/ |
| | ESIRAIWTGVKWLIDVDVVGFFDNIDHDVLVSLLEKRIADRRFVR | 43084 . . . 45661/ |
| | LIRGLLKAGYVEDWVFHKTYSGTPQGGVVSPMLANIYLHELDMFM | Novosphingobium |
| | QAKMAGFDKGKQRSPSPDARRIRNRLSYVRRTVDQLRAKGRGDDP | aromaticivorans/ |
| | RVTSFLEEIGRLKAERLAVPASDAFDPNYRRLRYCRYADDFIIGV | ML |
| | TGSKSEARQIMEEVRTYLSDHLKLAVSAEKSGIHKASDGARFLGY | |
| | EV | |
| 8461 | GIDGKTFEDFGPDRLAPLIASVATGAYKPKPVRRVFIPKGKGKRR | >DS_N.a.I2/AF0 |
| | PLGIPTRDDRLVQEVARQLLERIYEPVFSKASHGFRPGRSCHTAL | 79317/ |
| | EHVKAVWTGVKWLVDVDVAGFFENIDHDILLKLLRKRIDDERFID | 53812 . . . 56360/ |
| | LIRDMLKAGVMEGRAHTQTYSGTPQGGIVSPILANIYLHELDEFM | Novosphingobium |
| | AGRITAFEKGKTRATNPEYRRLAGRIAKRRERLKRLEASDNADQV | aromaticivorans/ |
| | TVKAILAEINTLSKQMRSLPSRDAMDAGFRRLRYCRYADDFLIGV | ML |
| | IGSKDDARGVFAEVRTFLTEVLALTVSEEKSGIRKASDGTKFLGY | |
| | EV | |
| 8462 | GTINNTVDGFSKNRVSKIINNIKNGNYKPTPVKRVYIDKKGSKKK | >DS_Bacillifid\|1 |
| | RPLGIPTFDDKLVQLVIKYILEAIYEPNFSENSHGFRKNRGCHTA | 8918679\|locus\|V |
| | LKQIKKSGSGTKWFIEGDIQGFFDNIDHHILINLLRKRINDETLI | BIBacCer120424_ |
| | GLIWKFLRAGYMEDWQFHKTFSGTPQGGILSPLLANIYLNELDIY | 5472\| |
| | MEKYAERFGKGQPKDREVDKRYQYLHLKIKRGRKKADLLREQGKL | [Bacillus |
| | NESQELIHQVNEWIKERGQRPYYNPMSDKFKSLKYVRYADDFIVM | cereusQ1] |
| | LIGSKDDANAIKSDIAQFLNEELKLTLSEEKTLITHSSKKAKFLG | |
| | YNV | |
| 8463 | GSTDETIDGMSMAKIHRIIADLRRETYRWTPVRRVYIPKATGKTR | >W_[Herpetosiphon_ |
| | PLGVPTWSDKLVQEVLRSILDAYYDPQMSDHSHGFRPNRGCHTAL | aurantiacus |
| | KAIQRCWTGTRWFIEGDIAQYFDTINHTTLLTILAKRIHDGRFLR | _DSM_785]1598 |
| | LIQTLLQAGYLHDWVYHPTLSGTPQGGVISPLLANIYLHEFDQFV | 98445 |
| | EHTLIPAYTKGQRRKVNPAYAQMEQRISKLRRQREYASVTPLLKE | |
| | LRTLPSRDVHDPDYRRLRYVRYADDFLLGFAGTKVEAEAIKQQIN | |
| | VWLYDHLQLKLSTQKTLITHASSDPAHFLGYDI | |
| 8464 | GVTEETIDGMSIQKIDMIIEQLRQETYYWRPARREYIPKKNGKHR | >DS_Bacillifid\| |
| | PLGIPVWSDKLLQEVIRMILEAYYEPQFSEHSHGFRPKRGCHTAL | 190354377\|locus\| |
| | QEIQTWQGTHWFIEGDISSYFDTIDHCVLITMLSKQIQDGRFIRL | VBIStrAng1666 |
| | IKNMLEAGYLDDWKFRKTISGTPQGGVISPLLANIYLHQFDKWVG | 16_0608\| |
| | EELIPQYTRGKKQKANSAYNRLSRKIKFYQDKGEYKKAHQIIVER | [Streptococcus |
| | RNIPSVDTYDTNYRRLRYVRYADDFILGFTGSKAEAKDIKKQIGD | anginosus |
| | FLNIKLHLELSQEKTLITHATEESAKFLGYEI | C238] |
| 8465 | GVDNRTIDGFKYEMIDTLIEKLKTEQYYPKPVRRTYIPKKNGKTR | >DS_clostridiafid\| |
| | PLGIPCFEDKLLQEVIRQLLESIYEPIFSDNSHGFRPDRSCHTAL | 47030643\|locus |
| | CQIKNTMRGANWVIEGDITGCFDNIDHTILLNILSQKIEDGRFIE | \|VBISynGly1059 |
| | LIRRFLKAGYLEFKQMHRSLSGCPQGGIISPILSNIYLNEFDRYM | 27_0075 |
| | DEIINKNTKGKKRRSNPEYQRLRGKRYTAIKKGNLEEIKRLTKEI | [Syntrophobotulus |
| | QSIPSLDPMDSNFTRVKYVRYADDFVIEVIGSKEMAESIKEDVAT | glycolicus |
| | FLKEKLNLELNQEKTLITNLGNEKANFLGYEF | DSM8271] |
| 8466 | GTDKETIDGFSMDWIENIISSLKDESYKPNPSRRVYIPKKDDKQR | >DS_Bacillifid\|1 |
| | PLGIPSIKDKIIQEVVKEILVSMYEPIFSKASHGFRPNKSCHSAL | 8911848\|locus\| |
| | NDIKMTFGGIKWWIEGDIKGFFDNIDHHVLIGILRKRIKDEKFIK | VBIBacCer120424 |
| | LIWKFLKAGYMEDWKFNKTFSGTPQGGIISPVLANIYLHELDAFM | _2093\|[Bacillus |
| | EKQIIKFDEGKRRRDNPVYKKYNTAIWYRKNKLKEKWNTLNDDER | cereus |
| | KELQSEISTLEKEREKHSAVDNMDASFKRLKYVRYADDFVVGVIG | Q1] |
| | SKEDSKRIKEEITEFLHTSLKLELSQEKTLITSNKNLIKFLGYEI | |
| 8467 | GVDQRSIDGFSMKEVEDLISVLKSKSYQPYPSRRTYIEKKNGKKR | >DS_Bacillifid\| |
| | PLGIPSFYDKLVQEVIRMILEAIYDSSFSSSSHGYRKGKGCHSAL | 54164737\|locus\| |
| | LEIKRTFTGSKWFIEGDIKGFFDNIEHHTLVTILKRRIKDEAFIE | VBIBacThu15523 |
| | LIWKFLRAGYLEEWKFHNTYSGAPQGGIISPIISYIYLNELDTYM | 2_5952\|[Bacillus |
| | KKYQDRFESGKKRQINKEYSNLQYKVRKIQEKIDTAYLNGEVTRI | thuringiensis |
| | TELKEQQKVLKGKLLQTPYNNPMDENYRRLKYVRYADDFLIGVIG | serovar chinensis |
| | SKEDAILIKNEIASFLKEEIKLELSMEKTLITNAFKKHAKFLGFE | CT43] |
| | I | |
| 8468 | GVDNQTISAMSLERINKIIDSLKDESYSPTPTKRVYIPKKNGKLR | >DS_Bacillifid\| |
| | PLGIPSIGDKLVQEVCRMLLNSIYDESFEDTSHGFRDNRSCHTAL | 19729760\|locus\|V |
| | RQIQNRFVRCKWFVEGDIKGFFDNIDHNIMIDILSKRIDDERFLR | BIStrPyo25933_ |
| | LIRKFLKSGYMEQNQYHNTYSGMPQGSIISPILSNIYLDKFDKYM | 1754\| |
| | QNYKESFDKGNKRKQNKEYKALYDRRKRLENKLSKTTNKTEIDDI | [Streptococcus |
| | KSEIEEINKRYFNIPCLNPMDENFKRIQYVRYADDFIIGIIGSKA | pyogenes |
| | DAEMVKQDIGQFIKSELNLELSDEKTLVTKSTDRAKFLGFDI | MGAS10750] |
| 8469 | GTDGKTIDGMGMARINALIEKMRNSSYQPNPARRTYIPKSNGKMR | >DS_clostridiafi |
| | PLGIPSFDDKLIQEVVRLILESIYEPTFSDHSHGFRMNKSCHTAL | d\|42835086\|locus |
| | KYVQKYFTGTKWFVEGDIKGCFDNVDHHVLIAILRKRIADEQFIG | \|VBICloCf15856 |
| | LLWKFLKAGYMEDWNYHNTYSGTPQGSIISPILANIYLNELDHFM | 9_1256\| |
| | AEYAEKENCGDRRRINPAFKKKLDVCRGKEERLKRNISKMSEEEK | [Clostridium |
| | EGLLAEISELRRSLRSMPYSDQMDEGYKRVFYIRYADDFLIGVIG | cf.saccharolyticum |
| | RKADAEQVKQDVGHFIRENLHLEMSEEKTLITHGHDFAKFLGYEV | K10] |
| 8470 | GTDGKTEDEMSIDRINKLIESIKDETYSPNPAKRIYIPKKNGKMR | >DS_Bacteroidet |
| | PLGIPSFEDKLVQEAVRMVLEAIYEGHFEWTSHGFRPNRSCHTAL | esfid\|46993147\|locus |
| | KSLQNNFNGAKWFIEGDIKGFFDNIDHDVLIEIMKGRIADDRFLR | \|VBIOdoSpl |
| | LIRKFLNAGYMEEWQFNKTYSGTPQGGIISPVLANIYLDKFDKYM | 147623_0215\| |
| | NEYANKFNKGTVRSRNKDICKLNSRVHYLKRRINEVEDVNVRTRM | [Odoribacter |
| | VEELHEKQKRILTMPSGNDMDRNFRRLRYLRYADDFLIGVIGTKN | splanchnicus |
| | ECETIKADITKFMQEKLRLEMSQEKTLITNAQDSAKFLGYEI | DSM220712] |
| 8471 | GTDGQTISGMSIKRIQSIIDKLRDESYQPHPAKRIYIPKKNGKQR | >DS_Ba.fr.I1/A |
| | PLGIPSFEDKLVQKVIQMILESIYEGSFEKCSHGFRPHRNCHTAM | Y515263/ |
| | ASIMEGFDGTRWFIEGDIKGFFDNIDHDIMITILSERIADERFLR | 38446 . . . |
| | LIRKFLNAGYLEKWKFHKTFSGTPQGGIISPILANIYLDQLDKYV | 40893/ |
| | VEYISQFNRGKMRKRNPEYKRIASRKDKRVKKLKTETDEQKRAAL | Bacteroides |
| | RSEIVELHREMQKHPATLDMDEDFRRMRYVRYADDFLIGIIGSKD | fragilis/ |
| | DCVNIKADIKRFLCEKLKLELSDEKTLITHGHDHAKFLGFEV | ML |
| 8472 | GVDELTIDGMSIARIDQLIDSLKDESYQPHPSRRTYIPKKNGKLR | >DS_Bacillifid\| |
| | PLGIPSFDDKLLQQVIKMILEAIYEGQFEPSSHGFRPNKSCHTAL | 19673908\|locus\|V |
| | TQIQKTYTGTKWFIEGDIKSFFDNINHDVMIHILRERITDERFLR | BIStrPne132160 |
| | LIRKFLNAGYVEDWKFYKTYSGTPQGGIISPILANIYLDKFDKYM | _1355\| |
| | TDYVKNFCQGKYRKRTPEYRQNEIALGKARRALECVSTENQRQEV | [Streptococcus |
| | IQRIRQLEKERVLIPHSDPMDSSFKRLTYTRYADDFICGVIGSKE | pneumoniae |
| | DAHRIKADIKDYLEAVLKLELSVEKTLITNARDKAKFLGYHL | ATCC700669] |
| 8473 | GADGKTIDGMSIDRVEQLIGSLKNETYQPNPSKRTYIPKKNGKKR | >DS_B.t.I2/ |
| | PLGIPSFDDKLVQEVVRMILEAIYEGSFEHTSHGFRPKRSCHTAL | AE015928/ |
| | IDIQKTFTAVKWFIEGDIKGFFDNINHDVLINILRERIADERFLR | 3241156 . . . |
| | LIRKFLNAGYVEDWVFHRTYSGTPQGGIISPILANIYLDKFDKYI | 3243662/ |
| | KEYINRFNKGVTRKGDARYKLYEQRRYRLAKKLKNEKDVKVRKQM | Bacteroides |
| | TAEIKRLREERNNYPARNEMDSSIKRLKYVRYADDFLIGITGNLE | thetaiotaomicron |
| | DCKTVKEDIKNYLNEALKLELSDEKTLITNAQKPAKFLGYDV | /ML |
| 8474 | GSDGKTIDGMSLKRIENLIDALKDESYQPKPARRTYIPKKNGNMR | >DS_Bacteroidet |
| | PLGIPSIDDKLVQEVLRMLLEAIYEGSFENTSHGFRPKRSCHTAL | esfid\|87116544\|locus |
| | IQVQKNFTAAKWFIEGDIEGFFDNINHDVLIGILKERIADDRFIR | \|VBIAliFin1 |
| | LMWKFLKAGYIEDWTFHRTYSGTPQGGIISPILANIYLDKLDKYM | 45170_0639 |
| | KEYACQFDRGDRRAMNLEYKRYSRKIWWLGTKLKQTKDKDTRKEL | [Alistipes |
| | IDAIKQHQKNRMHLPSVDEMDEGYRRIKYVRYADDFIIGVIGSKS | finegoldii |
| | DCEAIKEDIKNFLGEKLKLTLSEEKTLITHGNRKAKFLGYEI | DSM17242] |
| 8475 | GSDGRSIDEMSLARIETLIASLKDESYQPHPSRRVHIPKKNGKTR | >DS_Bacteroidet |
| | PLGIPAFEDKLVQEVVRMILEAIYEGHFETTSHGFRPKRSCHTAL | esfid\|87116554\|locus |
| | LHIQKTFSGAKWFIEGDIKGFFDNIDHDVLVGILRERISDDRFIR | VBIAliFin1 |
| | LIRKFLKAGYVEDWTFHNTYSGMPQGGIVSPILANIYLDKLDKYV | 45170_0644\| |
| | KEYIRHFDMGTKRRPGKESNDLANERKRTVRKLKKVKDGTEKAAL | [Alistipes |
| | VARLKAIEQERAAFPSGDEMDGSYRRLKYIRYADDFILGVIGSKE | finegoldii |
| | DALRIKEDIKSFLSESLALELSEEKTLITHTGKSAKFLGYEI | DSM17242] |
| 8476 | GTDGKTIVEIQKLPIEMVIKTIRNKLNYYQPKNVRRVEIPKDNGK | >DS_Bacillifid\|5 |
| | TRPLGIPSIWDRLIQQCVLQVLEPICEAKFHERNNGFRPYRSTQN | 8992730\|locus\|V |
| | AIAQCYKMAQIQNLHFVVDVDITGFFDNIDHSKLIRQLWGLGVQD | BIStrEqu204605 |
| | RKLIMIIKQMLKADILFKDIVITPETGTPQGGILSPLLANVVLNE | 0781\| |
| | LDWWVANQWEMFKIKEGSTGYEFTKVDNEGNILTIDRTQKWNKLR | [Streptococcus |
| | AKTGLKEMYITRYADDFKIFCRDYATAVKVMKATNLWLAENLHLQ | equi |
| | TSDEKSGITNLRKNYTTFLGIKF | sub sp. zooepidemicu |
| | | SATCC35246] |
| 8477 | GTDGTIIKDIGKLPAETVVKKVRYIVAGSPHGYRPKPVRRKEIPK | >DS_En.fm.I1/N |
| | PNGKTRPLGIPCMWDRLIQQCIKQVLEPICEAKFSENSYGFRPNR | Z_AAAK03000007/ |
| | SVENAIKATYNRLQISQLHYVIEFDIKGFFDNVNHSKLIKQIWAM | 10877 . . . 13634 |
| | GIRDKHLIFILKRILKAPIKMTNGTITYPEKGTPQGGIISPLLAN | /Enterococcus |
| | IVLNELDHWVESQWQENPVTKNYVVHINKSGSPCKSNAYKEMKKT | faecium/ |
| | KLKEMYMVRYADDFRVFCRYKESAEKAKIAITQWIEQRLKLEVSQ | BacterialB |
| | EKTRIVNVRKRYSDFLGFKI | |
| 8478 | GTDKLKISDIGKLTADEVTARVRRIVKGGKNGYTPRSVRRKEIPK | >DS_clostridiafi |
| | PNGSTRPLGIPCIWDRLVQQCIKQVMEPICEARFSNNSYGFRPNR | d\|42996817\|locus |
| | SVENAIAAIYRLMQRSGLYYVVEFDIKGFFDNVDHSKLIKQLWSL | \|VBIEubSir1356 |
| | NIRDKELLYVIRRILKAPILMPDGHIEHPAKGTPQGGIISPLLAN | 46_1742\| |
| | VVLNELDHWIESQWQCNPVTENYSYRENATGCPIQSHAYRAMRNT | [Eubacterium |
| | RLKEMYIVRYADDFRILCRTKEQADRTLIAVTHWLKERLRLDVSP | siraeum |
| | EKTRVVDTRRSYSEFLGFKI | 70/3] |
| 8479 | ACDNVNIKNIEGMEQSYFLNEVKRRFQNYQPQKVRRKEISKPNGQ | >DS_B.a.I2/AE0 |
| | TRPLGIPAMWDRIIQQCILQVMEPICEAHFSNRSYGFRPNRSAEH | 11190/ |
| | ALADASVRVNKQNLTYVVDVDIKGFFDEVNHVKLMRQLWTLGIRD | 30945 . . . 33835/ |
| | KQLLVIIRKILKAPVQMPDGTTMFPTKGTPQGGILSPILANVNLN | Bacillus_ |
| | EFDWWISRQWETFKAKKVKPRCMRGIWCNDVVTTQLTKTSKMKPM | extractionanthracis/ |
| | YIVRYADDFKIFTNTRSNAEKIFKATQMWLEERLKLSISAEKSKV | BacterialB |
| | TNLTKQQSEFLGFTL | |
| 8480 | GIDGKTIKDIEKLTTERYLDIVKKRFKFYKPRKVKRTEIPKPNGK | >DS_En.fm.I3/F |
| | TRPLGIPSIWDRVAQQCILQVLEPICEAKFNPHSHGFRPNRSAEH | N424376.1/ |
| | AIADCAKKMNIIKMGYCVDIDIQGFFDEVWHSKLMRQMWTMGIRD | 17411 . . . 20180/ |
| | KELLTIIRKMLKAPVVLPNGTIQFPEKGTPQGGILSPLLANINLS | Enterococcus |
| | EFDWWVSEQWETRHMSEIKTQYNANGTEHMGNHHRKMRSHTKLKE | faecium/ |
| | FYIVRYADDFKLFCHNRKTAELLYHASIQWLEQRLHLPVSIEKSK | BacterialB |
| | ITNLRKESSEFLGFNL | |
| 8481 | GVDDITIKDIENLEQTIFVEMVRKRFSNYSPRKVRRVEIPKPNGK | >DS_Bacillifid\|2 |
| | TRPLGIPSIWDRIAQQCILQVIEPICEAKFNKHSYGFRPNRSTEH | 02064373\|locus\| |
| | AIADMLFRINQQKLHYVVDVDLQGFFDEINHKKLMNQVWTLGIHD | VBICarSp26422 |
| | KQLLVIIRKMLSAPIVLKNGSIMHPVKGTPQGGILSPLLANISLN | 3_1846 |
| | EFDWWISNQWETFETRKKYAAAVMGNGTKNRGLTYRMLRKNSKLK | [Carnobacterium |
| | EIYIVRYADDFKLITSNRRDAEKIFIASQMWLKERLGLPISKEKS | sp. WN1359] |
| | KITNLRKEESEFLGFTI | |
| 8482 | GIDGVTIKDVEKLSQEDFIKIVQKRFSNYTPRKVRRVEIPKPNGK | >DS_Bacillifid\|1 |
| | TRPLGIPSMWDRIAQQCIKQVLEPICEAKFNKHSHGFRPNRSPET | 8859935\|locus\|V |
| | AMADATLRVNRSHMQYVVNVDIQGFFDEVNHKKLMRQLWTMGIRD | BIBacCer118379 |
| | KQLLVIIRKMLKAPIVLPNGEMQYPNKGTPQGGILSPLLANINLN | _5432\| |
| | EFDWWITNQWEDRLLKELSLTIKKGGHVDKYPHYSKMRKTTALKE | [Bacillus cereus |
| | MYIVRYADDFKIFTATKSNAQKIFKACEMWLQERLKLPISKEKSK | ATCC10987] |
| | ITNLRKESSEFLGFEI | |
| 8483 | GVDGITISDIERLNENDFVEIIRANLSNYRPGPVRRVYIPKKNGK | >DS_Bacillifid\|1 |
| | KRPLGIPNLYDRIIQQTIKQVIEPIVEAKFFKHSYGFRPLRSVEQ | 90447919\|locus\| |
| | AMGRMHSVINNVQLHYVVDVDIKGFFDNVNHNLLRHQIWNMGIRD | VBIEntSp29956 |
| | TKLIAIISKILRAEIVGEGTPVKGTPQGGVLSPLLANIVLNDLDQ | 9_0686\|[Enterococcus |
| | WIASQWENFPSKHRYSRGKLHRALKGTTLKEGYLVRYADDFKLLT | sp. HSIEG1] |
| | RSYSMAKRWYTAIRGYIEKHLKLEISPEKSGITNLRKKRTEFLGF | |
| | EI | |
| 8484 | GTDGKTIDDMKELSENDLVNEVRSKLQNYHPKKVRREWIEKENGK | >DS_Bacillifid\|8 |
| | WRPLGIPCILDRVIQQCFKQVLEPIVESQFFKHSYGFRPLRSAHH | 7137209\|locus\|V |
| | AMARIQFLINHSQLHYVVDVDIKSFFDNVNHRLLKKQLWNIGIQD | BIHalHal165146 |
| | RKVLACISKMITSEIDGEGVPDKGSPQGGILSPLLSNVVLNDLDQ | 0228\| |
| | WVADQWEVFPLTKSYSSDDARRRARKQTNLKQGYLVRYADDFKIL | [Halobacillus |
| | CRDGKTAQRWYHAVRLYLKERLKLDISPEKSQIVNLRKRESEFLG | halophilus |
| | FTI | DSM2266] |
| 8485 | GTDSFTIDNYKEMNQAEFIHLILSQLENYKSKSIKRVMIPKPNGE | >DS_Bacillifid\|4 |
| | KRPLGIPCMIDRIIQQMFKQVLEPICEAKFYEHSYGFRPLRSAKH | 7119490\|locus\|V |
| | ALGRIMYLINISKMHYAVDIDIKGFFDNVNHRLLIKQLWNIGICD | BIEntFae176554 |
| | KRVLAILSKSLKSPIQGEGISSKGTIQGGIISPLLSNVVLNDLDH | 2204\| |
| | WVSKQWHTFETKYPYTKGYNKFRALRDTNLKQGYIVRYADDFKIM | [Enterococcus |
| | TNDYPSALKWFHAVKLYLKDRLKLDISNEKSKIVNLRKRKSEFLG | faecalis 62] |
| | FTI | |
| 8486 | GIDSFAIDQYKSMDKAEFLNLVRNRLNQYKPKAVKRVFIPKPNGD | >DS_Bacillifid\|1 |
| | KRPLGIPTMFDRLIQQMIKQILEPICEAKFYEHSYGFRPLRGARH | 01938694\|locus\| |
| | AISRVMYLISRNTFHYAVEIDIKGFFDNVNHTLLLKQLWNMGIKD | VBIBac Thu2420 |
| | KRVLKLIYLILKAPIKGVGIPRKGTPQGGILSPLLSNVVLNDLDQ | 10_5758\| |
| | WIARQWHHFQSDYDYTEPGNRSRALKRTKLKQGYIVRYADDFKIM | [Bacillus |
| | AKDFRTAQKWFMATKLYLKERLKLDISPGKSRIINLRKNKSEFLG | thuringiensis |
| | YSL | MC28] |
| 8487 | GTNGHTIKHLNKIDADKLIRLTQKRLENYMPHAVRRLFISKPNGK | >DS_Bacillifid\| |
| | MRPLGIPTIEDRLIQQMFQQVLEPIVEGKFHPQSYGFRPKRGTHD | 18820991\|locus\|V |
| | ALARCYHMVNHSHQHFVVDIDIKGFFDNVNHKKLMRQLWTIGIRD | BIBacCer84800_ |
| | KKVLSIIKKMLKAEVTGEGIPVKGTPQGGILSPLLANVVLNELDW | 3811\| |
| | WVSNQWETKPTRVPYKLKRNKTDALKKTRLKPMYLVRYADDFKIF | [Bacillus |
| | TNSYDNARKIKIAVEKWLKERLGLEISEEKSKITNLRKNGTDFLG | cereus |
| | IRF | 03BB102] |
| 8488 | GTDGLTIKDIAGMTNQEVITMVKRRLKNFTPQSVRRVEILKDNGQ | >DS_clostridiafid |
| | NRPLGIPTMSDRLIQACIYQILEPICEARFHNHSYGFRPTRRTEH | \|115616442\|locus\| |
| | ALATMHRMINIQHLHFVVDVDIKGFFDNVDHGKLLKQMWTMGIQD | VBIDehSp22 |
| | KNLLCIISAMLKAEIEGIGIPNKGVPQGGLCSPLFSNVVLNELDW | 8777_1269\| |
| | WISDQWESYETSYPYKRNEGKIRAIRRGSKLKECYIIRYCDDFKI | [Dehalobacter |
| | MCPTRDVAERMFVAVKLWLKERLNLEISSEKSKITNLRKKSSEFL | sp. CF] |
| | GFKI | |
| 8489 | GTNKRTIIDVGEENPYQLVQYVQNRENNFQPHSIRRVEIPKPNGK | >DS_C.d.I1/X98 |
| | TRPLGIPTIEDRLVQQCIKQILEPILEAKFHKHSYGFRPERSSHH | 606/ |
| | AIAIFQQWTFKGFHYVVDIDIKGFFDNVNHGKLVKQLWTMKIRDK | 13 . . . 2658/ |
| | TFISILSRMLKAEVKGIGKSTKGTPQGGILSPLLANVVLNELDWW | Clostridium |
| | IDSQWDGFPTKRKYSSLLSKTQSIRKYSNLKEIKIVRYADDFKIM | difficile/ |
| | CKDYHTAQKIFLATKQWLKVRLDLDISPEKSKVTNLRKNYSDFLG | BacterialB |
| | FKL | |
| 8490 | GVDNKNIDDLKSIPDTDFISIVQTKLSEYKPQPVKRVEIPKPNGK | >DS_Bacillifid\|2 |
| | TRPLGIPTIWDRIVQQCLLQVLEPIMEAKFHDKNYGFRPNRSAHH | 02104716\|locus\| |
| | AFAQAVRMAQVSKLTFVVDIDIEGFFDNVNHSKLIKQLWSLGVRD | VBIEntMun2812 |
| | KWLLGVIRAMLKAPIIHKDGHIEHPKKGTPQGGILSPLLANVVLN | 67_0501\| |
| | ELDWWISSQWETHPTRHNYDWYHAEKEYWNKGNKYRALRGTSLKE | [Enterococcus |
| | IYIVRYADDFKIFCRKRSDADKIFLATKLWLKERLKLDISQEKSK | mundtii |
| | VVNLKKQKSEFLGFTL | QU25] |
| 8491 | GTDTLNIKDIEKLSVEKLVEMMQRKLAWYQPKPVKRVEIPKPNGK | >DS_clostridiafid\| |
| | TRPLGIPTIVDRLVQQCILQVLEPICEAKFYERSNGFRPNRSAEH | 19436501\|locus |
| | AMAQCYRMVQKQNLYFVVDVDIKGFFDNVNHSKLIRQMWAMGIRD | \|VBICIoCel5778 |
| | KQLICIIKQMLKAPVVMPDGETLYPTKGTPQGGILSPLLANIVLN | 3_2839\| |
| | ELDWWISSQWEDMLTHREYYVSVNNNGSLNKSGVFRTLRRSALKE | [Clostridium |
| | MYIVRYADDFKIFCRKRSDANKIFVAVKKWLKDRLKLEISEEKSK | cellulolyticum |
| | VVNLKKHYSEFLGFQF | H10] |
| 8492 | GVDGRTIKHLSRLNEEEYISLIQKQFHWYKPRPVKRVEILKPNGK | >DS_Bacillifid\|1 |
| | IRPLGIPTIVDRIVQQCILQILEPICEAKFHDSSYGFRPNRSTEH | 90355818\|locus\| |
| | AIAECARLMQIQHLHYVVDIDIQGFFDNVYHAKLIRQLWNLGIQD | VBIStrAng1666 |
| | KKLLCIIKEMLKADIVMPDKEVITPTKGTPQGGILSPLLSNVVLN | 16_1315\| |
| | ELDWWVSSQWLTMPTHYPYKQRTNSQGTEIKSHTYRALRTSNLKE | [Streptococcus |
| | IYIVRYADDFKIFCRNYYDAKRTYQAVTKWLQDRLKLNVSEEKSK | anginosus |
| | ITNLKQRYSEFLGFKL | C238] |
| 8493 | GVDKRTIADLAKLSEEEYVRLIRKQFSNYHPGPVRRVEIPKPNGK | >DS_E.f.I3/AE0 |
| | TRPLGIPTIVDRIVQQCILQVMEPICEAKFSENSNGFRPNRSAET | 16830/ |
| | AIAQCMRLIQVQHLYHVVDLDIKGFFDNISHTKLIRQIWALGIRD | 2249712 . . . |
| | KKLLCIIKEMLKAPVVLPNGEKTYPARGTPQGGILSPLLANIVLN | 2252481/ |
| | ELDWWIASQWEEMPTKTKFKTRSNAQGTEIKSHAYRALRRSRLKE | Enterococcus |
| | MHAVRYADDFKIFCATHEDAVRAYKATELWLKDRLGLEISPDKSK | faecalis/ |
| | VVNLKRQYSDFLGFKL | BacterialB |
| 8494 | GTNNKTIKDLEEKSTEELVEYVRNRLEYYVPQSVRRVYIPKPDGR | >DS_clostridiafid\| |
| | KRPLGIPTIKDRLIQQCIKQVLEPICEAKFHNHSYGFRPNRSTKH | 115343359\|locus\| |
| | AIARIMYLINFSKLHYTVDIDIKSFFDNVDHNKLKKQLWSMGIRD | VBIHalHal14 |
| | KKLISILGNMLEAKIEGEGVPEKGTPQGGIISPLLSNIVLNEMDW | 9681_0148\| |
| | WISNQWETFKTDYKYNRKGDKITAIKKTNLKEIYIIRYADDFKIM | [Halo |
| | CRDFETASKIKIATIKWLKERLNLEVSEKKTSITNLKKNHTEFLG | bacteroides |
| | IKL | halobios |
| | | DSM5150] |
| 8495 | GTNHKTINDIAGESEDEIIEYVRKRLNKFYPHSVKRIYIPKNNGD | >DS_clostridiafi |
| | KRPLGIPTIEDRLIQRSILQVLEPICEAKFHPHSYGFRPNRSTEH | d\|19408375\|locus |
| | AIARAMTLINMNKLHYVVDVDIKGFFDNVNHGKLLKQLWTLGIKD | \|VBICloBot1990 |
| | KKLIKIISLMLKAQIKDGSMITNPVKGTPQGGIISPLLANVVLNE | 8_0265\| |
| | LDWWISSQWETFETKHNYSKLRTFKNGTTTIDKSHKYRALRNGKL | [Clostridium |
| | KEIYIVRYADDFKVFCKNPKDAEKIFIAIKLWLKERLDLETSPEK | botulinum |
| | SKVTNLRKHPTEFLGFEL | Ba4str.657] |
| 8496 | GSNDTTILEIAEQNLTTFVAKVQKALENYNPKPIRRVYIPKRNGD | >DS_Bacillifid\|3 |
| | KRPLGIPTMEDRIVQQCIKQILEPICEAKFYNHSYGFRPNRNAKH | 8137486\|locus\|V |
| | AIVRAMSLMNISKFHYVVDIDIKGFFDNVNHGKLLKQIWSLGIRD | BIBacThu148000_ |
| | KSLLSIISKILKTEIENVGKMEKGTPQGGIISPLLSNIVLNELDW | 5492\|[Bacillus |
| | WISSQWETMITRHNYESIDKRNNTIIRSHKYTALRRTSNLKEMFL | thuringiensis |
| | VRYADDFKIFCKDENSAQKTLIAVKKWLKNRLGLEVNNEKSKVTN | BMB171] |
| | LRRNYTEFLGFKL | |
| 8497 | GTDGITIEQYKIEDVETFVDEIRATLKNYKPQTVRRVEIPKPNGK | >DS_Bacillifid\|2 |
| | TRPLGIPTMRDRLIQQMFKQILEPICEARFYNHSYGFRPNRSTHH | 2412306\|locus\|V |
| | AMGRCQFLANIALNQHVVDIDIQGFFDNVSHSKLLKQMYSIGICD | BILysSph89750 |
| | KRVLSVVSKMLKAPIKGIGIPTKGTPQGGILSPLLSNIVLNDLDW | _0101\|Mobileele |
| | WISNQWENMKTKFNYKERKNKVLMIKRTTTLKEMYIVRYADDFKI | mentprotein |
| | FTKSHKNAIKLYHAVKGYLKNHLNLDISNEKSKITNLRKRASEFL | [Lysinibacillus |
| | GFSL | sphaericus |
| | | C341] |
| 8498 | GTDGITIDDYKLANIEIFVSYIRSVLSNYKPQKVRRVYIPKSNGK | >DS_Bacillifid\|2 |
| | KRPLGIPTMRDRIIQQMFLQILEPICEAQFYNHSYGFRPNRSTKH | 02109853\|locus\| |
| | AMARCKFLTRKNFHYVVDIDIKGFFDNVNHNKLIKQLYTIGIKDK | VBIEntMun2812 |
| | RVLAILAKMLKATIEGEGIPKKGTPQGGILSPLLSNVVLNELDWW | 67_2992 |
| | IANQWEFLKTKENYHPAARLKSLKRKTTLKEMFIVRYADDFKIFT | [Enterococcus |
| | KDHQSAIRIYHGVKGYLSNHLSLDISPEKSKITNLRKRDSEFLGF | mundtii |
| | SL | QU25] |
| 8499 | GVNTNTIMDIGEENPDELAIYVRERLINYKPQPVRRVEIPKPNGK | >DS_clostridiafi |
| | MRPLGIPTIEDRIIQQCIKQVLEPICEAKFHKDSYGFRPNRSTHH | d\|19462591\|locus |
| | AIARTYSLANINKLTYVVDIDIKGFFDNVNHSKLLKQMWTMGIQD | \|VBICloKlu1115 |
| | KNLLCVISKMLKAEIKGVGIPNKGTPQGGILSPLLSNIVLNELDW | 49_0642\| |
| | WISNQWQTLKSKFPYKREIFKYQALKRSKLKEVYIVRYADDFKLF | [Clostridium |
| | CRSYNNAKKIFKAVTMWLKERLGLEINEEKSSIVNLKQKYSEFLG | kluyveri |
| | FKF | DSM555] |
| 8500 | GTDGMTIDDIKQLSNAEIVATVRESLSNYRPKSVRRVFIPKAGSD | >DS_Bacillifid\|6 |
| | KMRPLGIPCIWDRLVQQCILQVLEPICEPKFHNHSYGFRANRSAH | 7659680\|locus\|V |
| | HAVSRVTTLINLSKYHYCVDVDIKGFFDNVNHGKLLKQIWTLGIR | BIEntFae233823 |
| | DKRLICIISKMLKAEIDGEGVPEKGTPQGGLLSPLLSLIVLNELD | 1913\|[Enterococcus |
| | WWVSSQWETFQPKNRSKNGWLQYAKKYTKLKSGFIVRYADDFKIM | faecium |
| | CSTYGEAQRFYHSTVDFLNKRLKLEISPEKSKVVNLKKNSSDFLG | Aus0004] |
| | FKI | |
| 8501 | GVDNLTIKDIWHLNDTKIIHEVRKRLNNYQPQAVKRVLIPKEGSD | >DS_Bacillifid\|1 |
| | KKRPLGIPTIWDRLVQQSILQVLEPICEAKFHNHSYGFRPNRSTH | 8825078\|locus\|V |
| | HALSRVVSLINIGHQHYCVDIDIKGFFDNVCHKKLLRQMWTLGIR | BIBacCer120511 |
| | DKSLLCVISKILKSEIEGEGIPNKGTPQGGIISPLLSNIVLNELD | 0128\|[Bacillus |
| | WWISSQWETYKPHRISTRHLGFRQYARKYTNLKCGYVVRYADDFK | cereus |
| | IMCRTYDEAQRFYHATVDFLKSRLGLEINPKKSKVVNLKKNSSVF | AH187] |
| | LGFKI | |
| 8502 | GVDGLTIKDVRQLNDFQVINQVRKRLMNYRPSPVRRVYIPKEGSD | >DS_Bacillifid\|2 |
| | KKRPLGIPTIWDRLVQQCILQVLEPICEAKFHNHNYGFRPNRSTH | 01989473\|locus\| |
| | HALSRMVSLINVGKHHYCVDIDIKGFFDNVQHGKLLKQMWAIGIR | VBIBacThu9392 |
| | DKRLLSIISNLLKAEIIGEGIPSKGTPQGGILSPLLSNIVLNELD | 6_0768\|[Bacillus |
| | WWISNQWETYKPHRFKDGPNGFTTYARKYTNLKGGYIVRYADDFK | thuringiensis |
| | IMCRTYEEAQRFYHATVDFLKARLGLEINPEKSKVVHLKKNSSDF | YBT1518] |
| | LGFKI | |
| 8503 | GTDGMTINDIKMLSTDEVIEKVKMMFGWYEPQSVRRVFIPKPNGN | >DS_Bacillifid\|1 |
| | RRPLGIPTIWDRLFQQCVLQILEPICEAKFHNHSYGFRPNRSTHH | 01939315\|locus\| |
| | ALARMKSLVNRKGNGFHYCVDIDIKGFFDNVHHGKLLKQLWTIGI | VBIBacThu2420 |
| | RDKKLLSIISRLLKAEIVNEGVPQKGTPQGGILSPLLSNIVLNEL | 10_6066\| |
| | DWWVSNQWETIKTSHPYKGNSDKYRALKKSKLKECFLIRYADDAK | [Bacillus |
| | ILCRDYVTALKMFEATKDFLRTRLHLDISLEKSKIINLRKKASHF | thuringiensis |
| | LGFTV | MC28] |
| 8504 | GTDGSTIKDINNIDIDEVITKIKTMFDFYTPKSIRRVEIPKANGK | >DS_clostridiafi |
| | TRPLGIPTIWDRLFQQCILQVLEPICEAKFHKHSYGFRPNRSTHH | d\|54454697\|locus |
| | AITRSVYLINITKLYHCVDVDIKGFFDNVNHGKLLKQLWALGVKD | \|VBICloBot1788 |
| | KKLLKIISVMLKAPIEGIGIPTKGVPQGGILSPLLSNIVLNELDW | 72_0058 |
| | WVSNQWETFKTDKDYTKYRTSKTGKIVVDHSIRNKMLKKSKLKEI | [Clostridium |
| | YIVRYADDFKIFCRTRSQAKAIDIAVGDMLKNRLGLECSAEKSKV | botulinum |
| | LNLKKSYSEFLGFKM | BKT015925] |
| 8505 | GDDGLTIEDINRLSVSEVVSTIQRMFEYYTPQAVRRVFIPKANGK | >DS_B.me.I1/A |
| | TRPLGIPTIWDRLFQQCILQVLEPICEAKFYKHSYGFRPNRNTHH | B022308/ |
| | AKARFETLINRACLYHCVDVDIKGFFDNVNHAKLIKQLWSLGIRD | 3853 . . . |
| | KALLSIISRLLKAEIIGEGFPKKGTPQGGILSPLLSNIVLNELDW | 6569/Bacillus |
| | WVSNQWESFETHKLYKSNLGRYNALKQSNLKHCYIVRYADDFKIL | megaterium/ |
| | CRTRSQAIKMYYAVNDFLHTRLRLEISEQKSKVVNLKKNSSEFLG | BacterialB |
| | FRS | |
| 8506 | GTDGKTISDILTLNYDEAINFVKRCFKKYTPNPIRRVHIPKPGKK | >DS_G.k.I1/BA |
| | EKRPLGILTIADRIIQECVRMVIEPILEAQFFQHSYGFRPYRDAK | 000043/1312755 |
| | QAIERCVFICNRIGYNWVIEGDIKGFFDNVNHTILIKQLWHMGIR | . . . 1315536/ |
| | DRRMLMIIKAMLKAGVIKETKINEMGTPQGGIISPLLANVYLHKL | Geobacillus |
| | DQWITREWEEKKMRNGTTIRTAKYKSLRDHSTITKPEFYVRYADD | kaustophilus/ |
| | WVLFTNSRGNAEKWKYRIKKYLKENLKLELSDDKTLITNIKKKPM | BacterialB |
| | KFLGFKI | |
| 8507 | GTDGETIDDILQDGYESVISRVRKCFLAYNPKLLRRVHIDKQVSK | >DS_Bacillifid\|3 |
| | DKRPLGIPAIIDRIIQECIRMIIEPILEAQFFSHSYGFRPYRSAE | 1950695\|locus\|V |
| | HALSKVTNTAYDTNYCWVVEGDIKKFFDNVNHTILIKKLYSMGIR | BIBacPse80461 |
| | DRRVLMIIKAMLQCGVLGEAEQTTVGTPQGGIISPLLANAYLDSL | 4012\|[Bacillus |
| | DHWITREWENKETKHEYSRLDGKYRALKNASNLKPAHFVRYADDW | pseudofirmus |
| | VLITNSKANAIKWKQRIAKHLKEQLKLELSEEKTLITNIKKKAIK | OF4] |
| | FVGFHF | |
| 8508 | GVDGKTIQDYLRLSEEKLIELIRGRLTNFKAHLIKRVFIPKANGG | >DS_B.c.I5/AE0 |
| | QRPLGIPTIEDRIIQQMMKQVLEPVLEAQFFKYSFGFRPERTTYH | 17195/ |
| | ALERVKVLVHNTGYHWIVEGDIRQFFDKVNHRILIKKLWSMGIKD | 84166 . . . 86938/ |
| | RRILCLITEFLKAGIFKNIIRNDNGTPQGGILSPLLANVYLHSFD | Bacillus |
| | KWVAKQFEEFTTRHEYSKHDHKLRGLKSSNLKPGYLIRYADDWVL | cereus/ |
| | VTNNKSHAYRWKTVIKNFLQKELKLELSEEKTRITNIRHKPIEFL | BacterialB |
| | GFKY | |
| 8509 | GVDSLTINDILQADEEKVIHLITNTIRDYTPSMVRRVWIPKAGKK | >DS_Bacillifid\|2 |
| | ELRPLGIPTILDRIIQQCVKQVIEPICEAQFFPYSFGFRPYRDGH | 02001215\|locus\| |
| | MAIERVGSLIHKTKYHWIVEGDIRKFFDKVNHNILLKNCFKIGIQ | VBIBac Thu9392 |
| | DKRVLMLIKAMLKAGVMHENTKTTLGTPQGGIISPILANIYLHDF | 6_6557\|[Bacillus |
| | DMWVYNQWQNKKTRKNYANKHSRTTTLKRTTKLKQGYLIRYADDW | thuringiensis |
| | VIVTNSKTNAIKWKKAVSHYLKDKLKLELSEEKTKITNVRKKNIE | YBT1518] |
| | FLGFKL | |
| 8510 | GIDQKIVDDYLLMPTEKVFGMIKAKLNDYKPIPVRRCNKPKGNAK | >DS_Bacillifid\|4 |
| | SSKRKGNSPNEEGETRPLGISAVTDRIIQEMLRIVLEPIFEAQFY | 5223831\|locus\|V |
| | PHSYGFRPYRSTEHALAWMLKIINGSKLYWVVKGDIESYFDHINH | BIGeoSp94955 |
| | KKLLNIMWNMGVRDKRVLCIVKKMLKAGQVIQGKFYPTAKGIPQG | 1285\| |
| | GIISPLLANVYLNSFDWMVGQEYEYHPNNANYREKKNALAALRNK | [Geobacillus |
| | GHHPVFYIRYADDWVILTDTKEYAEKIREQCKQYLACELHLTLSD | sp. Y412MC52] |
| | EKTFIADIREQRVKFLGFCI | |
| 8511 | GIDNKTIDYYLHLPYEDLVSQVQTCIEDYNPEPVRRKYIPKENSD | >DS_Bacillifid\|3 |
| | KLRPLGIPTMIDRIIQEITRLVIEPIAEAKFYKFSYGFRPMRSAE | 1950623\|locus\|V |
| | HAMAEILEKARKSKTYWVIEGDIKGYFDNINHNKLITMLWKIGIK | BIBacPse80461 |
| | DKRVLSIIKKMLKSGIVEEDGEIYPSDLGSPQGGIISPLLANIYL | 3976\|[Bacillus |
| | NFFDWMIAEEFDQHHYINNYERRDKGLRAIRRDHKPVYSIRYADD | pseudofirmus |
| | WVVLCSSKKQADTLLIKIRKYLKHQLSLELSEEKTKITNLVEEKA | OF4] |
| | SFLGFEF | |
| 8512 | GIDKKDVNYYLQMEAKQLIKLIRQHIDNYKPNPVRREYINKGNGK | >DS_Bacillifid\|1 |
| | KRPLGIPTMIDRIIQEIARIVLEPIAEAKFFNHSYGFRPYRSCHY | 8919101\|locus\|V |
| | AIGRVLNTISRSKTYIAIEGDIKSFFDHINHNKLVEMMWNMGIKD | BIBacCer120424 |
| | KRFLIIIKKMLRAGVLEDKVILPTEIGTPQGGIISPLLANIYLNN | _5683\|[Bacillus |
| | FDWMVAKEFEEHRARYTVKHAFRSGLTKVGRRHKKCFLIRYADDW | cereus |
| | IILCEDTVQARILLTKIDKYYKHILKLELSKEKTFITDLREKPAR | Q1] |
| | FLGFDI | |
| 8513 | GVDGTTINDYLQMDRKQLINLIQSQIDNYNPSTVRRTYIPKGNTG | >DS_Bacillifid\|9 |
| | KLRPLGIPVIVDRIIQEIARMAIEPYCEAKFYPHSYGFRPYRSSE | 6574781\|locus\| |
| | HAIARIVQNINSKAYIAIEGDIKGYFDNINHNKLLAILWEMGIKD | VBIBacCer255427 |
| | KQFLFLIKKMLKSKILDNGNIISSDKGTPQGGIISPLLANVYLNN | _4629\| |
| | FDRMVSDLWESHSAVTTYAATRNGKTVEEKNYQFLRKKSVAKHYK | [Bacillus |
| | TNLVRYADDWIILTETKEYAEKLLTKLRKYMKHQLSLELSEEKTV | cereus FRI35] |
| | ITDSREEPLHFLGFRI | |
| 8514 | GIDGVTIEQMDDYLHQNWRETKKLIKERSYKPQPVLRVEIPKPNG | >DS_S.ag.I1/AJ |
| | GVRNLGIPTAMDRMIQQAIVQVLSPLCEKHFSEYSYGFRPNRSCE | 292930/ |
| | TAIVQLLEYLNDGYEWIVDIDLEKFFDTVPQDRLMSLVHNIIQDG | 182 . . . 203 |
| | DTESLIRKYFHSGVVINGQRHKTLVGTPQGGNLSPLLSNIMLNEL | 8/Streptococcus |
| | DKGLEKRGLRFVRYADDCVITVGSEAAAKRVMHSVSSYIEKRLGL | agalactiae/ |
| | KVNMTKTKIVRPNKLKYLGFGF | BacterialC |
| 8515 | GIDNMSIEEFNDFAKLHWLGIKQQLLNGSYQPLPVKRVMIPKPDG | >DS_E.c.I7/AY7 |
| | GERMLGIPAVIDRVIQQAIAQVISPYFEPQFSPHSYGYRPHKRAS | 85243/ |
| | QAVNHVQSCVKQGYKTAVDIDLSKFFDEVDHDMLMNRVSRKIKDK | 414 . . . 2383/ |
| | ALMRLLGKYLRAGIAERETGLWFESTKGVPQGGPLSPLLSNILLD | Escherichia |
| | ELDKKLTYKHLKFARYADDIIILVKTKSEGLIIQREITAFITKRL | coli/ |
| | KLKVNESKSRVGPVSGSKFLGFTF | BacterialC |
| 8516 | GIDDMTVNDLLPYLRENKTELIASLREGKYKPAPVKRVEIPKPNG | >DS_La.re.I1/A |
| | GVRKLGIPTVVDRMVQQAVAQILTPIFERVFSDNSFGFRPHRGAH | Y911856/ |
| | DAIAKVVDLYNQGYRRVVDLDLKAYFDNVNHDLMIKYLQQYIDDP | 603 . . . 2512/ |
| | WTLRLIRKFLTSGVLDHGLFAKSEKGTPQGGPLSPILANIYLNEL | Lactobacillus |
| | DKELTRRGHHFVRYADDCNIYVKSQRAGERVMRSITQFLEKRLKV | reuteri/ |
| | KVNPDKTKVGSPLRLKFLGFSL | BacterialC |
| 8517 | GIDGMPVEDLESHLRHHWPTLRQSLLDGTYQPKPVKRVEIPKGDG | >DS_Gfid\|42345 |
| | TKRALGIPTVIDRFVQQIIAQALSALWEPHFHPSSFGFRPARSAQ | 729\|locus\|VBIGa |
| | QAVKYVQTLQREKYEWVVDLDLKSFFDEVNHDRLIARLKTRVEDK | mPro61291_151 |
| | VLLRLINKFLHAGINANGILLRSEKGVPQGGPLSPILANIVLDEL | 7\|[gammaproteo |
| | DWELEHRGHKFARYADDCNIMVKSKAAGERVMKSIRRFLETTLRL | bacterium sp. |
| | RVNDQKSAVDRPTKRNFLGFTF | HdN1] |
| 8518 | GVDGMQVKELRYWFSNNHQKLIEQLKEGNYRPMTIKGQEIPKPGG | >DS_M.sp. I1/AF |
| | GVRQLGIPTVQDRLVQQAIAQQLSKRYDPTFSQYSYGFRKGRNAH | 339846/ |
| | QALRQAGAYVKEGFNYVVDLDLEKFFDKVNHDRLMWLLGRRISDK | 29388 . . . 31287/ |
| | RVLKLIGKFLRSGILIGGLENQRISGTPQGSPLSPLLSNIVLDEL | Microscilla |
| | DKELERRGHRFVRYADDMILLVRSQEAAERAYSSITSFIENRLLL | sp./BacterialC |
| | KVNKDKSRICRPYQLNFLGHSI | |
| 8519 | GIDGVTTAEWPEHARAHWPATREQIEAGRYRPQPVRRVDIPKPDG | >DS_N.e.I1/AL9 |
| | GQRQLGIPTVTDRVIQQAIAQVLIPIFDPGFSASSFGFRPGRNAH | 54747/ |
| | QAIRQVQAHVKAGYRWAVDLDLARFFDNVNHDLLMSLLSRSIADK | 2285095 . . . |
| | RLLALIGRYLRAGVLVGEHPQPSEVGTPQGGPLSPLLANVLLHQF | 2287101/ |
| | DLELERRGHRFARYADDVIILVKSRRAAERVMQSLTYFLQSTLKL | Nitrosomonas |
| | TVNLAKSQVAPMSECSFLGFTL | europaea/ |
| | | BacterialC |
| 8520 | GVDGVTIDAFPERFRPLWGDIRASLATGTYQPQPVLRVEIPKPTG | >DS_G.s.I1/AE0 |
| | GTRPLGIPTVLDRLIQQATAQVLTPIFDPEFSASSFGFRPGRSAH | 17180/ |
| | NAVRQLREYLRQGYRIAVDIDLAKFFDTVNHDLLMTMVGRRVRDK | 1028657 . . . |
| | RVLTLIGRYLRAGVEVDGRLEKTRMGVPQGGPLSPLLANILLDHL | 1030564/ |
| | DKELESRGHKFVRYADDFVILVKSERAGERVMGSVRKYLTNKLKL | Geobacter |
| | TVNEDKSKVARSGDLSFLGFVF | sulfurreducens/ |
| | | BacterialC |
| 8521 | GIDGMTIEAFPLWMQQGGWQRCKSLLERGEYNPSAVRRVEIDKPD | >DS_Sh.ba.I2/C |
| | GGKRKLGIPNVIDRVIQQAIAQILTPLFDPFFSANSFGFRPNRNA | P000563/ |
| | KQAVLQVRDIIKQKRKFAVDVDLSKFFDRVNHDLLMTQLRIKVQD | 2137684 . . . |
| | KRLLALIGKYLRAGVTVNDQFEASFEGVPQGGPLSPLLSNIMLDS | 2139633/ |
| | LDKELESRGHKFARYADDFIILVKSIRAGERVLKSITRYLATKLK | Shewanella |
| | LVVNEQKSQVVEVGQSKFLGFTF | baltica/ |
| | | Bacterial |
| | | C |
| 8522 | GIDGMNIDEFPAWVRSGNWKALKQQLVTGCYQPSPVRRVEIAKPD | >DS_P.ae.I1/AY |
| | GGTRQLGIPTVTDRVIQQAITQVLTPIFDPEFSEHSFGFRPGRNG | 029772/ |
| | QQAVKQVQSIIKEGRRFAVDVDLSKFFDRVNHDLLMTRLGDKVKD | 3515 . . . 5441/ |
| | KRLLRLIKRYLRAGFIDNQFKGESRVGVPQGGPLSPLLANIMLDS | Pseudomonas |
| | LDKELEKRGHKFARYADDFTILVKSQRAGERVLRSISQYLQSRLK | aeruginosa/ |
| | LVVNTDKSRVVKTNESQFLGFTF | BacterialC |
| 8523 | GVDNMPVTALKGYLQEEWPRIREELLTGTYHPQPVRKVEIPKPGG | >DS_Ge.ur.I2/C |
| | GTRMLGIPTVLDRLIQQAVHQVLSPLFDPGFSISSHGFRPGRSAH | P000698/ |
| | QAIKAARKYVESGLRWVVDIDLEKFFDRVHHDTLMSLVKRKVGDR | 242469 . . . 244398/ |
| | LVLSLIDSYLKAGILEGGVTSPRLEGTPQGGPLSPLLSNILLDEL | Geobacter |
| | DKKLERRGHKFCRYADDANIYVATRRSGERVMASITGYLSERLKL | uraniireducens/ |
| | TVNQGKSAVDRPWKRSFLSYSM | BacterialC |
| 8524 | GADGMTVADLAGYVKQYWPTLKARLLAGEYHPQAVRAVEIPKPQG | >DS_P.a.I1/U77 |
| | GTRQLGIPSVVDRLIQQALQQQLTPIFDPLFSDYSYGFRPGRSTH | 945/1 . . . 1919/ |
| | QAIEMARAHVTAGHRWCVELDLEKFFDRVNHDILMACIERRIKDK | Pseudomonas |
| | CVLRLIRRYLEAGIMSGGVVSPRQEGTPQGGPLSPLLSNILLDEL | alcaligenes/ |
| | DRELERRGHRFVRYADDANIYVRSPRAGERVLVSVERFLRERLKL | BacterialC |
| | TVNRKKSQVARAWKCDYLGYGM | |
| 8525 | GVDEKDIEATRLYLRENGQEIIQLIREGKYKPQPVRRVEIPKANG | >DS_B.sp. I1/NZ |
| | GKRQLGIPTVTDRVIQQAVVQRLTPIFERQFSHFSYGFRPNKSAH | _AAOX01000004/ |
| | QAIEQARQYIEEGYNFVVDMDLEKFFDRVQHDKLMSLIAKTISDK | 96386 . . . 98244/ |
| | PTLKLIRRFLQAGVMVNGVVITNREGTPQGGPLSPLLSNIILNEL | Bacillus |
| | DKELEKRGHKFVRYADDCNIYVKSIKAGERVKQGVTEFLERKLKL | sp./BacterialC |
| | KVNEEKSAVGKPSARTFLGVSF | |
| 8526 | CGVDGMKVDELLQYLKQNGKTLIASIFNGKYCPKAVRRVEIPKPD | >DS_C.a.I1/AE0 |
| | GGIRLLGIPTVVDRTIQQAISQVLTPIFEKTFSENSYGFRPKRSA | 01437/ |
| | KQAIKKAKEYMEEGYKWVVDIDLAKYFDTVNHDKLMALVARKIKD | 3710916 . . . |
| | KRVLKLIRLYLQSGVMINGVVSETERGCPQGGPLSPLLSNIMLTE | 3712835/ |
| | LDRELEKRGHKFCRYADDNNVYVRSKKAGDRVMRSITRFIENKLK | Clostridiuma |
| | LKVNKEKSAVDRPWRRKFLGFTF | cetobutylicum/ |
| | | Bacterial |
| 8527 | GVDEMDVKSLRLHLHENWTSIRNEIIEGSYFPKPVRRVEIPKPNG | >DS_B.h.I1/APO |
| | GVRKLGIPTVMDRFLQQAIAQILTQLYDPTFSERSFGFRPHRRGH | 01507/ |
| | NAVRQAKQWMKEGYRWVVDIDLEKFFDKVNHDRLMRKLSSRIQDP | 130149 . . . 132031/ |
| | RVLQLIRRYLQTGVMERGLVSPNTEGTPQGGPLSPLLSNIVLDEL | Bacillus |
| | DNELEKRGLKFVRYADDCNIYVRSKRAGLRIMESVTSFIENRLKL | halodurans/ |
| | KVNREKSAVDRPWNRKFLGFSF | BacterialC |
| 8528 | GIDEMSVKFLRRHLYDNWDSLRENLRKGTYTPSPVRRVEIPKPSG | >DS_O.i.I1/BA0 |
| | GVRMLGIPTVTDRFIQQAIAQVLHTIFDPSFSEHSYGFRPNRRGH | 00028/ |
| | DAVRKARGFIKEGYRWVIDMDLEKFFDKVNHDKLMGVLAKRIKDK | 2785523 . . . |
| | ELLRLIRKYLQSGVMINGIVVSSEEGTPQGGPLSPLLSNIILDDL | 2787411/ |
| | DKELEERGLRFVRYADDCNIYVRTKKAGNRVMNSITTFIEEKLRL | Oceano |
| | KVNKEKSAVDRPWKRKFLGFSF | bacillusiheyensis/ |
| | | BacterialC |
| 8529 | GVDGLGIVETAEHLKTAWPGIRAQLLAGTYRPDPVRRVLIPKPGG | >DS_P.s.I1/AE0 |
| | GERKLGIPTVTDRLIQQALLQVLQPLLDPDFSNHSYGFRPERSAH | 16853/ |
| | QAVLAAQQYIHSGRQIVVDVDLEQFFDCVEHDVLIARLGRKVKDR | 2381076 . . . |
| | DVLRLIRAYLNSGALIEGMVMTSTRGTPQGGPLSPLLANVVLDEV | 2382906/ |
| | DKELERRGHCFVRYADDANVYVRSPKAGQRVMALLRRLYGRLGLR | Pseudomonas |
| | VNESKSAVASAFGRKFLGFSF | syringae/ |
| | | BacterialC |
| 8530 | GVDGLDIGQTARHLVTAWPVIREQLLKGTYRPDPVRRVTIPKPDG | >DS_B.f.I1/NZ_ |
| | GERELGIPTVTDRLIQQALLQVLQPILDPTFSEHSYGFRPGRRAH | AAAC01000271/ |
| | DAVLAAQSYVQSGRRIVVDVDLEKFFDRVNHDILIDRLKRRIDDA | 24723 . . . 26575/ |
| | GVIRLVRTYLNSGIMDDGVVQQRDQGTPQGGPLSPLLANVLLDEV | Burkholderia |
| | DKELERRGHCFARYADDANVYVRSRRAGERVMALLRRLYGRLRLK | fungorum/ |
| | VNETKSAVASVFGRKFLGYSL | BacterialC |
| 8531 | GVDGRTVQQTGEDLKTQWPDIRRGLLDGTYRPSPVRRVGIPKLGG | >DS_Bfid\|19041 |
| | GTRELGIPTVVDRLIQQALLQVLQPLIDPTFSEHSYGFRPGRSAH | 3778\|locus\|VBIV |
| | QAVQAARQYVEQGRRVVVDVDLGKFFDRVNHDILMDRLGKRIADK | arPar264937_3261\| |
| | AVLRLIRHYLNAGIMAHGVMQMRVEGTPQGGPLSPPLLANVLLDE | [Variovorax |
| | VDRALERRGRKFVRYADDCNVYVKSERAGQRVLDGVRACYAKLRL | paradoxus |
| | KVNETKTAVATAWGRKFLGYCL | B4] |
| 8532 | GVDGLTIEETPEYLKTHWSRIRLELLNGTYRPQAVRRVEIPKPTG | >DS_Bfid\|22964 |
| | GMRELGIPTVLDRLIQQALLQVLQPMIDLTFSEFSYGFRPGRSAH | 000\|locus\|VBIPo |
| | DAVLQAQRYVQEGFQVVVDVDLEKFFDRVNHDILMDRLAKRIADK | 1Sp102244_5444 |
| | AVLRLIRQYLQAGIMAGGVVMDRSEGTPQGGPLSPLLANVLLDEV | \|[Polaromonas |
| | DLDLQRRGHRFARYADDCNVYVRSQKAGERVLLSLRKLYEKLHLK | sp. JS666] |
| | VNEKKTEVGPVFGRKFLGYCL | |
| 8533 | GVDKLTVQELKPWLKQHWLSVKGTLIAGSYLPRAIRKVDIPKPNG | >DS_fid\|190304 |
| | DVRTLGIPTVVDRLIQQAIAQTLSPYVEPSFSNSSYGFRPNRNAW | 141\|locus\|VBISe |
| | QAVRQAQQYIQSGKRWVVDMDLEKFFDRVDHDILMSRLARTIKDK | rSp8482_4636\| |
| | RLLKLIRRYLEADMVEGKEVIKRDKGMPQGGPLSPLLSNILLDEL | [Serratia |
| | DKELERRGHSFCRYADDCNIYVSSQKAGKHAQKDISEFLMNTLKL | sp. |
| | QVNVRKSAVARPWERKFLGYSF | ATCC39006] |
| 8534 | GVDNLSVGELKGWLKQHWASVREALLQGNYVPQAIRQVEIPKPDG | >DS_fid\|190303 |
| | GVRILGIPTVVDRLIQQAIQQHLTPDYEPEFSDSSYGFRPGRNAG | 244\|locus\|VBISe |
| | QAVQQAQSYMQSGRRWVVDLDLEKFFDRVNHDILMARLSWKIKDT | rSp8482_4195\| |
| | RLLKLIRRYLEADRVAGSEITRRREGMPQGSPLSPLLSNILLTDL | [Serratia sp. |
| | DRELERRGHKFCRYADDGNIYVCSRQAGEHAMKEISHYLENKLRL | ATCC39006] |
| | KVNAHKSAVDRPWKRKFLGYSV | |
| 8535 | GVDALEVTALRDWLKVSWPSVRAALLGGQYIPQSVRAVDIPKPSG | >DS_Bfid\|21533 |
| | GVRTLGIPTVVDRLIQQALLQVLQPLYEPGFSESSYGFRPRRSAQ | 277\|locus\|VBICu |
| | QAVLQAQRYVQEGRRWVVDIDLEKFFDRVNHDILMSRVARQVKDV | pTai42494_3259 |
| | RVLKLIRRYLEAGLMRGGVVEARRQGTPQGGPLSPLLSNILLTDW | [Cupriavidus |
| | DRELEKRGLAFCRYADDCNIYVRSQAAGQRLLAGMMTFLAERLNL | taiwanensis] |
| | QVNEAKSACARPWARKFLGYSL | |
| 8536 | GVEGMSVSELPDYLKHHWPELKAQLLSGSYCPSPVRRVTIPKPGG | >DS_Gfid\|21803 |
| | GERLLGIPTVVDRFVQQATMQVLQRQWDASFSDSSYGFRPGRSAH | 083\|locus\|VBIDi |
| | QAVKQAQGYIGSGHHWVVDLDLEKFFDRVNHDVLMSRVAKRVSDK | cZeal11179_3566\| |
| | RVLSLIRGFLNAGVMEAGLVSPVTEGMPQGGPLSPLLSNLLLDDF | [Dickeyazeae |
| | DKELEKRGLKFARYADDCNIYVKSERAGNRVMEGLTHWLSRKLKL | Ech1591] |
| | KVNAKKSAVAHPAMRKFLGYSF | |
| 8537 | CGVDGMTVQALPAFLREQWPSIRATLLNGTYKPQPVRRVEIPKPD | >DS_Bu.vi.I2/C |
| | GGGVRKLGIPCALDRFVQQAVLQVLQRQWDPTFSEASYGFRPGRS | P000617/381828 |
| | AHQAVAKAQSYIQSGYRWVVDLDLEKFFDRVNHDILMSRVARRVS | . . . 383697/ |
| | DRRVLKLIRSFLTAGVMEHGLVGATDEGTPQGGPLSPLLSNLMLD | Burkholderia |
| | DLDRELGRRGLRFVRYADDCNVYVRSERAGQRVMVGLKAFLTGKL | vietnamiensis/ |
| | KLKVNEAKSAVARPHTRKFLGFSF | Bacterial |
| 8538 | GVDGMTVIGIKDYLKQHWPAIRGQLLSGTYEPKPVRRVEIAKPDG | >DS_So.us.I3/C |
| | GVRKLGIPTVLDRFIQQAVMQVLQRRWDRTFSDYSYGFRPGRSAQ | P000473/ |
| | QAVAQAQQYIAEGHGWCVDLDLEKFFDRVNHDKLMGQIAKRIADK | 9594438 . . . 9596378/ |
| | RLLKLIRAFLNAGVMENGLVSPSVEGTPQGGPLSPLLSNLVLDEF | Solibacter |
| | DRELERRGHRFVRYADDCNIYVRSERAGQRVMESITQFITQKLKL | usitatus/ |
| | KVNETKSAVARPQERKFLGFSF | BacterialC |
| 8539 | GVDGMTVDDLPTYLKANWLTIRAQLLDGTYKPQAVRRVEIPKASG | >DS_Br.sp. I1/C |
| | GVRLLGIPTVVDRFIQQAVLQVLQGEWDRTFSDASYGFRPGRSAH | P000494/ |
| | QAVTKAQAYIASRHRIVVDIDLEKFFDRVNHDILMGLVAKRVADK | 6816299 . . . 6818172/ |
| | RLLKLIRGFLTAGVLEGGLVSPTEEGAPQGGPLSPLLSNLMLDVL | Bradyrhizobium |
| | DKELERRGHRFVRYADDCNIYVRSRKAGERVMASIETFLERCLKL | sp./BacterialC |
| | KVNRAKSAVARPNHRKFLGFSF | |
| 8540 | GQDGITFEHIEERGRAGFLGAVAEELRTGTYRPRPYRRREIPKEG | >DS_Mx.xa.I1/C |
| | GKVRVISIPSIRDRVVQGALRLVLEPIFEADFSGSSFGARPGRSA | P000113/ |
| | HEAIDTVRQGLRRRRHRVVDVDLKAYFDSIRHAPLLERVARRVQD | 2433780 . . . 2435766/ |
| | GEVLALVKQFLRSTGDRGIPQGSPLSPLLANIALNDLDHVLDRGR | Myxococcus |
| | GFLTYARYLDDMVVLAPDSEKGRRWAARALERIRQEAEALGVSLN | xanthus/ |
| | KEKTRTVTMTDRNASFAFLGFDF | BacterialF |
| 8541 | GIDDLSFEDIEASGRIVFLAEIQADLKTGRYEPKPNRRVEIPKSN | >DS_Bfid\|58553 |
| | GKVRVLQVPCIRDRVVQGALKLILEAVFEADFCPNSYGFRPKRSP | 039\|locus\|VBICu |
| | HRALAEVRRSVLRRMSTVVDVDLSRYFDTIQHSTLLGKIAKRIQD | pNec201015_1883\| |
| | PQVMHLVKQVIKAAGKVGVPQGGPFSPLAANIYLTEIDWMLDEIR | [Cupriavidus |
| | RKTAQGPYEAVNYHRFADDIVITVSGHHTKRGWAERALLRLREQL | necator |
| | VPLGVELNTEKTTVVDTLHGEAFGFLGFDL | N1] |
| 8542 | GIDGKSFADIELEGVIPFLTGIQEELQAGIYQPQANRKVEIPKTN | >DS_B.th.I3/DQ |
| | GKMRTLQIPCIRDRVVQGALKLILEAIFEADFCPNSYGFRPKRSP | 363750/ |
| | HQALAEVRRSILRRMTIIIDVDLSRYFDTIRHNILLEKIAKRVQD | 30070 . . . 32039/ |
| | PQVMHLVKQVIKATGKIGVPQGGPFSPLAANIYLNEVDWTFDTIR | Bacillus |
| | RKTADGNYEAVNYHRFADDIVIAVSGHSSKSGWAELALRRLWEQL | thuringiensis/ |
| | KPLGVELNLEKTQMVNVLKGESFGFLGFDL | Unclassified |
| 8543 | GIDGVTFESIETEGSRKYLQRIRHELITKTYSPNRNRRKEIPKSG | >DS_W.e.I5/AM |
| | EKFRTLNIPCIRDRIVQTALKLILEPIFESDFQKGSYGYRPKRNA | 999887.1/ |
| | HEAVQKVTEAAIKGNTKVIDVDLKSYFDSVRHHILMEKIAKRIND | 284826 . . . 286812/ |
| | KEIMRMIKLILKIGGKRGMAQGSPLSPLLSNIYLNEVDKMLEKAK | Wolbachia |
| | EVTKEGKYQRMEYARWADDLVILIREYPKREWLERAVYRRLEEEL | endosymbiont |
| | AKLEVRVNEEKTKVINLKKGETFSFLGFDF | /Unclassified |
| 8544 | GVDGITFEDIEGIGVLKYLKKIREELVNETYKPQENRKQEIPKGN | >DS_gi\|3023920 |
| | GKVRVLGIPTIKDRIVQGALKLILEPIFEADFQESSYGYRPKRTA | 22\|ref\|WP_01327 |
| | HQAVKKIEKAIVSGKRKVIDLDLSSYFDTVKHHILLAKIAKRVID | 8223.1\|Acetohalobium |
| | KEVMHLIKLMLKASGKEGVPQGGVISPLFANLYLNEVDRMLERAK | arabaticum |
| | EVTKSKGKYTELEYARFADDIVIAVSSHPSMNWLLSKVIQRLKEE | DSM5501 |
| | LDKIKVKVNKEKTKVVNLEKGERISFLGFTL | |
| 8545 | GIDGVTFEAIEESGVEQFLGEVRKELVSGSYRPLKNRRKAIPKGD | >DS_Ma.sp. I2/C |
| | GKERVLGIPSIRDRVVQGALKLILEPIFEADFQSGSYGYRPKRMA | P000471/ |
| | HQAVNRVAIAIAQGKTQVIDADLKSYFDTVQHDLALRKVSERVDD | 2464047 . . . 2465973/ |
| | DQVMHLLKLIFKTSGKRGVPQGGVISPLISNLYLNEVDKMLERAK | Magnetococcus |
| | EVTRKGKYTHIEYARFADDLVILVDGHHRWNGLARKVYQRLGEEL | sp./Unclassified |
| | AKLKVQLNLEKTRVVDLTRGEDFTFLGFNI | |
| 8546 | GIDGITFDNIEASGIEIFLQQIQKELISGTYWPTQNRRKEIPKGD | >DS_gi\|2585150 |
| | GKYRILGIPTIRDRVVQGALKLILEPIFEADFQEGSYGYRPKRNP | 71\|ref\| |
| | HQAIDRVAKAVVENKTRVIDLDLRSYFDTVRHDLLLKKVAKRVND | YP_00319 |
| | ENVMRLLKLILKASGKRGVPQGGVISPLLANLYLNEVDKMLEKAK | 1293.1\| |
| | EVTRHEQYTHIEYARFADDIVILIDAYPKWNWLEKAVYQRLLEEL | Desulfotomaculum |
| | TKLDVQLNEEKTRIVNLANGESFGFLGFDF | acetoxidans |
| | | DSM771 |
| 8547 | GIDRITLEEVEEYGVARLLDELAVELKEGSYRPLPARRVFIPKPG | >DS_Rh.sp. I1/C |
| | TVEQRPLSIPSVRDRIVQAAWKLVAEPVFEADFLPCSFGFRPRRG | P000432/ |
| | AHDALQVLIDESWRGCRWVVETDIANCFEAIPIEKLMQAVEERVC | 23005 . . . |
| | DQPFLKLLRVMLRAGVMEEGQVRRPVTGTPQGGVASALLCNVYLH | 25058/Rhodococcus |
| | RLDRAWDVDEHGVLVRYADDALVMCRSRRQAEAALTRLRELLADL | sp./Unclassified |
| | GLEPKEAKTRIVHLRVGGEGVDFLGFHH | |
| 8548 | GVDHVSMEAIASNPRKYLYPLWNRLSSGSYFPPPVKLVPIPKGDG | >DS_UMB_I1/A |
| | KERMLGIPTIIDRVAQEVIKAELEVIVEPRFHPSSFGYRPHKSAH | Y075117/120 2 |
| | EALEQCAKNSWERWYVVDLDIKGFFDNIDHEKMMGILRKHTNKKH | 136/uncultured |
| | ILLYCDRWLKTPMQDRVGGVQARMKGTPQGGVISPLLANLYLHEA | marine_bacterium |
| | FDQWISTTQPRIVFERYADDIVIHTRSMEQSHFILDKLKARLKSY | |
| | SLELHPDKTKIVYCYRTARFHKEGKEIPVSFDFLGFTF | |
| 8549 | GVDGMTIEAFEHNLARNLYKIWNRLSSGCYMPPPVKRVEIPKSDG | >DS_D149_(ZP |
| | KTRPLGIPTVSDRVAQMAVKMILEPQWDPLFSDSSFGYRPGKSAH | 06641622.1_) |
| | DAVAQAKANCWKYEWVIDLDIRGFFDNLDHALLLKAVDHLHPAPW | Serratia |
| | VRLCIVRWLKAEIIFPDGHRHSPEKGTPQGGVISPLLANLFLHYT | odorifera |
| | QDKWLEKHYPNNSWERYADDSIIHCRSRREAGLLLSQLRERMKAC | DSM4582416 bp |
| | GLELHPEKTRIVNCHPLTRRKNDGHYSFDFLGFTF | |
| 8550 | GADNVCIDMFEHNLENELYKLWNRMSSGSYMAPPVKRVEMAKADG | >DS_Ce_ja_I1/C |
| | KLRPLGIPTVADRVAQMVVKMTLEPEWDSKFHASSFGYRPRRSAH | P000934_1/3788 |
| | HAVQAAKINCWKYSWVIDLDIKGFFDNLNHDQLQKFVAQATDDPW | 874_3790736/ |
| | CKLYIKRWITAGVQMPGGELHKTAKGTPQGGVISPLLANLYLHKV | Cellvibrio |
| | FDSWMQKYFPQNPFERYADDIVCHCRTEHEAEQLLSAISRRMQRF | sp. |
| | DLTLHPEKTKIVYCGRRKIERTKAQSFDFLGFTF | |
| 8551 | GPDGVTVEQFEANVKDRLYVLWNRMSSGSYFPGPVGAVEIPKKGV | >DS_Fr_sp_15/C |
| | KGGARTLGIPNVVDRVAQTVLKLALEPKVEPVFHRDSYGYRPGRS | P000820_1/4042 |
| | QRQALEVCRKRCWSHDWVVDLDVRKFFDTVPWEKLLKAVAYHTDQ | 207_4044207/ |
| | KWVLMYVERCLKAPTKHADGTLQERTMGTVQGGPFSPLAANIYLH | Frankia |
| | WGLDAWMAREFPTVPFERWADDVVFHCVSLEQAREVRDAVVARLV | sp. |
| | EVGLEAHPDKTRIVYCKDSNRGGDYENTSFTFLSYTF | |
| 8552 | GIDTVSIEQFDESLSKNLYKLWNRMASGSYFPPAVKEVEIPKKDG | >DS_Zu_pr_12/ |
| | KVRKLGIPTISDRIGQMVVKMYLEPRLENVENPNSYGYRPNKSAH | CP001650_1/358 |
| | QALEQVRKNCWKMDWVIDLDIKGFFDNIDHHKMMLAIEKHVPERW | 9332_3591217/ |
| | VRLYIARWLASPVMTKSGNLVSNQGRGTPQGGVISPLLANLFLHY | Zunongwangia |
| | GLDKWLEQNDNTVKFTRYADDVIVNCKSQKHAEQTLEAIKSRMHQ | sp. |
| | IGLELHPEKTKIVYCRDYRRQEKYSNVKFDFLGYSY | |
| 8553 | GIDTQSLEQFEERLADNLYKIWNRMTSGSYHPKAVREVQIPKKSG | >DS_D182_(YP |
| | GYRGLGIPTVSDRVAQQVVKSYLEPKVEPSFHQDSYGYRPNKSAH | 003997451.1_) |
| | DALAKTVRNCGYYSWVVDLDIRGFFDNIDHELLMKAVRVYTDEKW | Leadbetterella |
| | IIMYIERWLEVGVVREGKVHKREKGTPQGGVISPLLANIFLHFVF | byssophila |
| | DKWMEKHHGNMPFERYCDDAIIHCTTWNQAVFIKNAVTKRMKECK | DSM17132410 bp |
| | LELNSEKTKIVYCKNSIHRESNPVPVSFTFLGHTF | |
| 8554 | GIDKVTLEDYEKNLRGNLYKLWNRMSSGSYFPPSVKLVEIPKSTG | >DS_B_t_14/AE |
| | GKRPLGIPTVSDRVAQMAVVMLITPSIEPCFHEDSYAYRPHRSAH | 015928/3254752 |
| | DAVGKARERCWKYAWVLDMDISKFFDTIDHELLLKALKRHTQEKW | /Bacteroides |
| | VLMYIERWLKVPYEKSDGSQVDRALGVPQGSVIGPVLANLFLHYT | thetaiotaomicron |
| | FDKWMEKNFPRVPFERYADDTICHCHSLKQAEYMQAMIQQRFECC | /BacterialD |
| | RLRLNEEKTKIVYCKSSRQKECYPNVTFDFLGFTF | |
| 8555 | GVDGVGLAGFESDLKGNLYRIWNRMSSGSYFPPPVKAVEISKEHG | >DS_D218_(ZP |
| | AGTRMLGVPTIGDRIAQTVVAARLEGVVEPKFHPDSYGYRPRKGS | _06415879.1) |
| | LDAVRKCRERCWKYDWVIDLDVRKFFDTVPWDRIIAAVEANTALP | Frankia |
| | WVLLYVKRWLAAPVRMPDGTLAERDRGTPQGSAVSPVLANLFMHY | sp. EUN1f417 bp |
| | AFDLWMVREFPACPFERYADDAVVHCKSLAQARFVLDRLRKRMEQ | |
| | VGVSLHPEKTRIVYCKDGKRRGSHEHTEFTFLGFTF | |
| 8556 | GVDGQSIDAFEKDLKNNLYRIWNRMSSGSYFPPPVRAVEIPKAHG | >DS_D154_(ZP |
| | GGVRVLGVPTVADRVAQTVVAMTLEPRMEQVFHDGSYGYRVGRSA | 06477373.1_) |
| | LDAVGACRQRCWQRDWVVDLDIQDFFGSCPHDLIVRAVEVNTDQP | Frankia |
| | WVVLYVRRWLTAPVCYPDGSLVTPDRGTPQGSAVSPVLANVFLHY | sp. |
| | ALDLWLAREFPGLPFERYVDDAVVHCATRRQAEQVRTAIGRRLEE | (symbiont of |
| | VGLRCHPAKTKVVYCKDSGRRGSHEHTSFTFLGYTF | Datiscaglomerata) |
| | | 421 bp |
| 8557 | GLDGLTMEAFEEDLKNQLYRLWNRMSSGSYFPPPVMRVEIPKSDG | >DS_Ma_sp_I3/ |
| | GVRGLGIPTIGDRIAQAVVKRYLEPLVEPKFHEDSYGYRPNRSAL | CP000471/78572 |
| | DAVRQARQRCWRDDWVLDLDISKFFDKLDHALVMRAVKRFTDCKW | 7/Magnetococcus |
| | VLLYIERWLKADVQLQDETILHREMGTPQGGVISPLLANIFLHLG | sp./BacterialD |
| | FDQWMKENYPHIHFERYADDIVVHCRSLKQLQWIKKRIEQRLKLC | |
| | KLSLNDKKTRVVYCKDSRRSGEWTCQSFDFLGYTF | |
| 8558 | GADEQTIKEFEEHLNNNLYKLWNRMASGSYFPKPVRAVAIPKKNG | >DS_D153_(ZP |
| | GIRILGIPTVEDRIAQMVAKMYFEPLVEPMFYNDSYGYRPNKSAI | _04856034.1_) |
| | QAVGQARERCFKRDWALELDIKGLFDNIKHGYLMYMVEKHTQIKW | Ruminococcus |
| | LILYIKRWLTVPFIMSDGSVAERRSGTPQGGVISPVLANLFLHYV | sp. |
| | FDDFMTKAYPNIWWERYADDGVLHCQSYKQAAFIKQKLEERFQQF | 5_1_39B_FA |
| | GLELNKEKTRIVYCKDNRRPQNYSCTQFTFLGYTF | A418 bp |
| 8559 | GVDGQSLEDFAGDLENHRYRLWNRLVSGSYFPPPVRRVEIPKAGG | >DS_B_j_I1/BA |
| | GIRPLGIPTVADRIAQMVVKRCLEPVLDGEFDPDSYGYRPGKSAH | 000040/2212569 |
| | QAIEQARKRCWQHDWVVDLDNKSFFDTIDHELLMRAVYRHTKADW | Bradyrhizobium |
| | IRLYIERWLKAPVEMPDGSVRARTTGRSQGGVVSPILANLFLHYV | japonicum/ |
| | FDVWMKGSYPHIPFERYADDIICHCRTRQEAEELKSALERRFADC | BacterialD |
| | HLLLHPEKTKVVYCADSNRRRSYPQIHFDFLGFSF | |
| 8560 | GVDGQTLESFGERLGPNLYKLWNRMSSGSYMPSSVRRVMIPKADG | >DS_Pa_de_I1/ |
| | GQRPLGIPTVTDRIAQEVVRLYLEPLVEPVFHRDSYGYRPERSAI | CP000491/19065 |
| | DAIRKARQRCWRYDWVLDMDIKGFFDTIDHELLLKAVRHHTDCRW | Paracoccus |
| | VLLYIERWLKAPVRMEDGSLVPQERGTPQGGVISPLLANLFLHYA | denitrificans/ |
| | FDRWLDRENPQVPFERYADDIICHCRTEDEARRLWQQVENRLAGC | Bacterial D |
| | GLTLHPQKTKIVYCKDTNRKGSFPTVAFDFLGYRF | |
| 8561 | GVDGQSIEEFEQDLSGNLYKLWNRLASGSYMPPAVRCVEIPKATG | >DS_D172_(YP |
| | GTRPLGIPTVADRIGQMVVKDALEPILEPCFHHDSYGYRPNKSAH | _003750926.1_) |
| | DALAVARQRCWRAAWVLDVDIKGFFDNIDHALLMKAVRKHIDCRW | Ralstonia |
| | ITLYIERWLTAPVQLPDGTSQARNKGTPQGGVISPLLANLFLHYV | solanacearum |
| | FDMWMVRNFPANGFERYADDVVIHSTSLKQVTMLRAQLTERLADC | 412 bp |
| | KLEMSPGKTKIVYCKDKRRKGGYPEISFDFLGYTF | |
| 8562 | GIDKISIEKYEKNLKNNLYKLWNRMASGTYFPKAVKAVEIPKKNG | >DS_D143_(AD |
| | GIRVLGVPTVEDRIAQMIVKLSMEKIIDPIFLNDSYGYRPNRSAH | O77309.1_) |
| | DAIKVTRSRCWKYDWVLEFDIKGLFDNINHKLLLKAVYKYAKYKW | Halanaerobium |
| | EILYIKRWLANPVSNNNKITKNTENGTPQGGVISPLLANLFLHFA | praevalens |
| | FDKWMEKRFPNNKWCRYADDGIIHCNSRAEAIFILNCLKERMKEC | DSM2228415 bp |
| | KLEIHPGKTKIIYCKDSNRKENNKLHEFTFLGYSF | |
| 8563 | GIDEVTLQEYENNLEDNLYKLWNSMSSGSYFPQAVRGVEIPKKNG | >DS_Al_me_I4/ |
| | GVRVLGVPSIDDRIAQNVMVSELNPKVEPIFYEDSYGYRENKSAI | CP000724/658338/ |
| | DAIEVTRKRCWEYDWLIEFDIVGLFDNINHDLLMKAVKQHTNEKW | Alkaliphilus |
| | VILYIERTLKVPMVMSDGIHVERTKGTPQGGVISAVLANLFMHYA | metalliredigens/ |
| | FDHWMTRKHSNNPWVRYADDGLIHSHSLKEAEVLLLKLGERFKDC | BacterialD |
| | HLEIHPNKTKIIYCKDDNRKQNHIHTNFDFLGYTF | |
| 8564 | GVDQESIEAFEKNLKGNLYKLWNRLSSGSYFPPPVKGVGIPKKTG | >DS_D115_(YP |
| | GIRMLGVPTVADRVAQTVGKETLEPLLEPIFHQDSYGYRPGRSAL | _911931.1_) |
| | DAVGVVRERCWKYDWVVEFDISKFFDTMNHELLMRAVRKHCQIEW | Chlorobium phaeo |
| | VLLYVERWLKAPMMSPEGDLVERTKGTPQGGVISPLLANLFLHYA | bacteroides |
| | FDRWVSENLPGVPFCRYADDGVLHCKSKEQAVLVMKKITKRFEAC | DSM266418 bp |
| | GLRVNPDKTRIVYCKDDKRKEDHPVTSFTFLGYTF | |
| 8565 | GVDRESLQAFETKLKDNLYKVWNRLSSGSYFPPPVRGVGIPKKSG | >DS_Pe_ph_I1/ |
| | GVRMLGVPTVADRVAQSVVKMVLEPILEPVFHEDSYGYRPGRSAH | CP001110/398581 |
| | DAIAVVRKRNWEYDWVVEFDIKGLFDNIDHELLMRALRKHCQTPW | Pelodictyon |
| | VFLYVERWLKAPMETPEGELIERTKGTPQGGVVSPLLANLFLHYA | phaeoclathratiforme |
| | FDRWVSENLPGVPFCRYSDDGVLHCKSKIQAELVKRKIGERFREC | /BacterialD |
| | GLELHPDKTQIVYCRDSNRKDEHPVNQFTFLGFTF | |
| 8566 | GIDDETIADFERNLPKNLYKLWNRMSSGSYFPPPVKAVEIPKASG | >DS_fid\|867055 |
| | GIRRLGVPTVSDRIAQTVVKLLIEPKLDALFHPDSYGYRPGRSAK | 94\|locus\|VBIPse |
| | QAIAITRERCWRYDWVVEFDIKAAFDHIDHELLMKAVRTHIKEDW | Put3905_0289\| |
| | ILLYIERWLVAPFEAADGVRIQRERGTPQGGVISPMLMNLFMHYA | [Pseudomonas |
| | FDAWMQRNSPNCPFARYADDAVVHCRSQRQAEHVMRSIASRLAVC | putida ND6] |
| | GLTMHPEKSKIVYCKDSNRRAGYPHVSFTFLGFTF | |
| 8567 | GVDGVTIEDFEKDLKNNLYKIWNRMSSGSYFPTPVAAVSIPKKSG | >DS_Vi_vu_I1/ |
| | GERVLGIPTVSDRVAQTVVRDKLEIMLEHHFLDDSYGYRVGKSAH | GQ292873_1/36 |
| | DAIEVTRRRCWQYDWVLEFDIKGLFDNIRHDLLMKAVKKHVQLAE | 20 __ 5549/ |
| | ESQSRDYQWITLYIERWLVAPLQKADGTQTERELGTPQGGVVSPV | Vibrio |
| | LANLFLHYVFDKWLEKNYPDNPWCRYADDGLVHARTKPKAEKLRD | Vibrio |
| | ELAKRFKECGLEMHPIKTKIVYCKDDIRRGSGKHIEHKQFDFLGY | vvulnificus/ |
| | TF | BacterialD |
| 8568 | GVDGVTIEQFEKDLKGNLYKIWNRMSSGAYFPPPVRAVSIPKKSG | >DS_D216_(ZP |
| | GQRILGVPTVADRVAQTVVKEIIEPALDAIFLADSYGYRPDKSAL | _08074908_) |
| | DAVGVTRERCWKFDWVLEFDIKGLFDNIDHTLLMRAVRKHVACPW | Methylocystis sp. |
| | ALLYIERWLTAPMMQEDGTLIERTRGTPQGGVVSPVLANLFMHYT | ATCC49242417 |
| | FDLWMARTFPHLRWCRYADDGLVHCRSEREARIVWEALASRMAEC | bp |
| | RLELHPTKTKIVYCKDDRRKANFENVAFDFLGYCF | |
| 8569 | GVDGQTLEIFEKDLAANLYKIWNRMSSGTYFPPPVRAVSIPKKAG | >DS_RmInt1_(Y |
| | GERVLGVPTVSDRIAQMVVKQMIEPDLDSLFLPDSYGYRPGKSAL | 11597.2_) |
| | DAVGVTRQRCWKYDWVLEFDIKGLFDNLPHDLLLKAVRKDVKCNW | Sinorhizobium |
| | ALLYIERWLTAPMEKNGEVIERSRGTPQGGVVSPILANLFLHYAF | meliloti |
| | DLWMTRTHPDLPWCRYADDGLVHCQSEQQAEALRVELSSRLAACG | 419 bp |
| | LQMHPTKTKIVYCKDQRRREAYPNVTFDFLGYQF | |
| 8570 | GVDGQTIEQFEADLKGNLYKIWNRMSSGSYFPPPVRAVPIPKKTG | >DS_RmInt2_(Y |
| | GQRILGVPTVSDRIAQMVVKQLIEPELDQIFLKDSYGYRPNKSAL | P_007194308) |
| | DAVGITRQRCWKYDWVLEFDIKGLFDNISHELLLKAVRKHVKCKW | Sinorhizobium |
| | ALLYIERWLTAPMEQDEQRIERDCGTPQGGVISPILSNLFLHYAF | meliloti |
| | DLWMDRTHPDLPWCRYADDGLVHCRSEQEAEAVKAALQARLAECQ | 419 bp |
| | LEMHPTKTKIVYCRDSKRRGQHPNVTFDFLGYCF | |
| 8571 | GIDKQSLADFDKRLVDNLYKIWNRLSSGSYFPPAVKAVAIPKKLG | >DS_E_c_12/X7 |
| | GERILGIPTVSDRIAQTVVKLAFEPQVEPHFLADSYGYRPNKSAL | 7508/518 |
| | DAIGVTRKRCWYYDWVLEFDIKGLFDNIPHELIMKAVDKHNPARW | Escherichia |
| | VKLYIQRWLTAPMVMSDGEVRARTMGTPQGGVISPLLANLFMHYV | coli/ |
| | FDKWLAKYYPKVPWYRYADDGILHCHSEAEATEMREVLRKRFSEC | BacterialD |
| | GLEMHPEKTRVIYCKDGSRKGDYEHTMFDFLGYTF | |
| 8572 | GVDDENIAAFESDLTNNLYKIWNRMSSGCYFPPSVKAIEIPKKSG | >DS_M_a_I53/A |
| | GTRILGIPTVLDRVAQMVTKIYLEPQLEPLFHPDSYGYRPGKSAA | E011185/2451M |
| | DALAATRKRCWRYNWLLEFDIKGLFDNINHDLLMKQVSMHTDKPW | ethanosarcina |
| | IILYIQRWLKAPFQMADGTVNERTKGTPQGGVVSPLLANLFLHYA | acetivorans/ |
| | FDQWMDSHHRYNPFERYADDSVIHCRSREEAERLWIELDKRLSEF | BacterialD |
| | GLELHPSKTRIVYCKDDDRQGDYPETKFDFLGYTF | |
| 8573 | GIDEQSIDEFERNLKDNLYKVWNRMSSGSYIPPAVKAVEIPKKAG | >DS_D152_(YP |
| | GIRTLGIPTVADRIAQMTVKLYFEPLVEPFFHEDSYGYRPKKSAI | 003428936.1_) |
| | QAIETTRKRCWKYNWVLEFDIKGLFDNIDHELLMRAVDKHTDIEW | Bacillus |
| | VKLYIKRWLTAPFQTKEGIKERTSGTPQGGVISPVLANLFLHYAF | pseudofirmus |
| | DKWMAINHPRNPFARYADDAVIHCKTEEEAKRVLESLNQRMNECK | OF4414 bp |
| | LELHPSKTKIVYCKDADRREDHKNITFDFLGYTF | |
| 8574 | GIDEVSLEEFEADLDNNLYKIWNRMTSGSYFPPPVKAIEIEKKSG | >DS_WP_01473 |
| | GKRVLGIPTVGDRVAQMVAKIYLNPLVDPYFHKDSYGYREGKSAI | 1166 Mesotoga |
| | DALEVTRQRCWRYDWVLEFDIKGLFDNIDHELLMRAVKKHVKIPW | prima |
| | LILYIERWLKAPFIQANGRVEERSKGTPQGGVISPVLANLFMHYA | 411 bp |
| | FDKWMERTHPDKPFARYADDGVIHCRTLEEARLLLESLKERMEEC | |
| | KLKLHPEKTRIVYCKDDKRKGEYPNTSFDFLGYTF | |
| 8575 | CGIDGETVFNFHLNLELNIEFLHDKLKTNGYEPSPVRRVEIQKPD | >DS_Al.or.I2/CP |
| | GGVRLLGIPTVKDRVVQQAIVNIIEPIFDKTFHPSSYGYRPNHSQ | 000853/2108190 |
| | HGAVAKAERFMNKYGLEHVVDMDLSKCFDTLDHEIMMKAVSERIS | . . . 2110275/ |
| | DGRVLKLIEKFLKAGVMHSDNFSRTEVGSPQGGVISPLLSNIYLN | Alkaliphilus |
| | QFDQRMMSKGIRIVRFADDILIFAKDKKTAGNYKAYATQVLENEL | oremlandii/ |
| | KLKVNNEKTKLTNVNEGVEFLGFVI | Bacterial |
| 8576 | GIDGQSVKDFAESLDVNLDRLLTELREKSYQPQPVRRVEIPKENG | >DS_D.p.I1/CR5 |
| | GIRLLGIPAVRDRVVQQALLDILQPIFDPDFHPSSYGYRPGRSCH | 22871/ |
| | QAITKATMFIRKYDRKWVVDMDLSKCFDTLDHDLILSSLSRRIKD | 6124 . . . 8213 |
| | GSILGLLKKILKSGVMTDEGWQASEVGSPQGGVISPLIANIYLDQ | /Desulfotalea |
| | FDQFMKKRGHRIVRYADDILILCSSKSAAKNALLQASCFLEKGLL | psychrophila/ |
| | LTVNREKTHICHSWSGVAFLGVSI | BacterialC |
| 8577 | GVDGVTVRQIRQRGEVGVFLAGIAASLRDGTYRPAPVRRVLIPKP | >DS_gi\|3171240 |
| | GGKSRPLGIPTVTDRVVQQSLRMVLEPIFEADFLPVSYGFRPKRR | 20\|ref\|YP_00409 |
| | AHDAVAEIHFYAGRGYRWVLDADIEGCFDHIDHTALLGLVRERIK | 8132.1\| |
| | DKKTVALVRAFLKAGVLSDLGLEAAAGEGTPQGGIISPLLANIAL | Intrasporangium |
| | SVLDEAIMAPWAQGGDQSTQTGRAKRRYHGLGNWRIVRYADDFVI | calvum |
| | MTNGSRDDVLALKEQAAEVLARVGLRLSESKTRVTHLSEGIDFLG | DSM43043 |
| | FHI | |
| 8578 | GVDGRTAASIVARIGIPEYLDGLRSALKDRSFRPLPVRERMIPKA | >DS_gi\|3361776 |
| | GGKLRRLGIATITDRVVQASLKLALEPIFEADFLPCSYGFRPMRR | 63\|ref\|YP_00458 |
| | AHDAVAEIRYLTSKPRCYEWIVEGDIKACFDEISHTSLTGRVRAR | 3038.1\|WP_0138 |
| | IGDRRVLALVKAFLKSGILVEDRLVRPTTAGTPQGSILSPLLSNV | 73076.1\|Frankia |
| | ALSVLDEHVARSPGGPGTGKTEKAKRLRHGLPNFKLVRYADDWCL | sp. Symbiont of |
| | VIKGTKADAEALREEIAGVLSTMGLRLSREKTLITHIDDGLDFLG | Datisca |
| | WRI | |
| 8579 | GIDGRTVSRIEGQGVEEFLAGLRESLKSGEFWPVPVKERMIPKAN | >DS_Ca.ac.I1/C |
| | GKLRRLGIPTVADRVVQAALKLVLEPIFEVDFEPCSYGFRPNRRA | P001700/4538431 |
| | HDAIAEIHHYASRGYEWVLEGDIEACFDNIDHTALMGRVRERVGD | Catenulispora |
| | KRVLRLIKAFLKSGIFSEGRAVRDTRTGTPQGGILSPLLANVALA | acidiphila/ |
| | VLDEHFAQVWQETGRTWAARDWHRRRGGATFKLVRYADDFVILAY | Unclassified |
| | GSRQHVEDLTADVAQVLSTVGLRLSPTKTAVAHIDEGFDFLGFRI | |
| 8580 | GVDGVAPRSLLHGQAVEVLTMIRRQVKTGEFRPLPVRERRIPKSN | >DS_gi\|2609054 |
| | GKTRSLGIPTLADRVVQASLKLVLEPIFEADFYPSSYGFRPRRRA | 81\|ref\|ZP_05913 |
| | QDAIAEIHKFTSRPLNYEWVFEADITACFDEIDHTGLIQRLRGRI | 803.1\|Brevibacterium |
| | TDKRVLALVRRFLKAGILSEDGVNRNTHTGTPQGGILSPLLANIA | linens |
| | LSGLDDHFQKKWESLGPSWTRAKLRRRGIPVMKLIRYADDFVVLV | BL2 |
| | HGSVEHVEALWHEVAEVLAPMGLRLSVEKTKVTHIDEGFDFLGWR | |
| | I | |
| 8581 | GADGITFAQIETEGRERWLENVRQELTAGDYRPQPLLRVWIPKSN | >DS_gi\|3549613 |
| | GGRRPLSIPTVKDRTVMTAAMLVIGAIFEADLLENQYGFRPKVDA | 71\|dbj\|BAL1405 |
| | KMAVRRVFWHIRDHRRSEIVDADLRDYFTSIPHAPLMKCLTRRIA | 0.1\|Bradyrhizobium |
| | DGRLLSMIKGWLTVAVIEKDGRRITRTAEARTKKRGTPQGSPLSP | japonicum |
| | LLANLYFRRFLLAWRHGHQDQLDAHIVNYADDFVICCRPGSSETA | USDA |
| | MARMQTLMNRLGLEVNDTKTRLARVPESVTFLGYTI | |
| 8582 | GVDGVTIEEIMKTDQGVAGFLEGIENSLRRKTYRPEAVQRVYIEK | >DS_So.us.I2/C |
| | ENGKLRPLGIPTVRDRVVQMATLLILEPIFEADFLDCSYGFRPGR | P000473/ |
| | SAHQALEEIRGHVEAGYQAVYDADLKGYFDSIPHTQLLACVRMRV | 3231872 . . . |
| | VDRSVLKLIRMWLEAPVVEREEGGGGSKWSRPEKGTPQGGVASPL | 3233814/ |
| | LANLYLHWFDALFYGPEGPGGKADAKLVRYADDFVVMAKQMGTET | Candidatus |
| | IEFIESRLEGKFQLEINREKTRVVDLREEGASLDFLSHTF | Solibacterusitatus/ |
| | | Bacterial |
| | | F |
| 8583 | FGVDGVSIESIEVRADGISGYLDEIQESLRTKNYKPSPVRRVYIT | >DS_Ge.ur.I1/C |
| | KPNGKLRPLGIPCVRDRIVQAAVLLILEPIFEVDFLDCSHGFRPK | P000698/ |
| | RRPHGALDQVGNNLQLGRQEVYDADLSSYFDSIPHEHLIVELERR | 1525569 . . . |
| | IADRSVLKLIRQWLHSPVREEDGSISRPKQGTPQGGVISPLLANI | 1527641/Geobacter |
| | YLHRLDRAFHEEADSPYHFARARMVRFADDFVVMARHMGNRITGW | uraniireducens/ |
| | LEEKLETDLGLSINRDKTGIVRMNKKESLNFLGFTL | Bacterial |
| 8584 | GIDDVTIDEFERNLEQNLNEIQRLLRQDRYVPKPVKRVYIPKPDG | >DS_UA.14/AY |
| | KQRPLGIPTIRDRVVQQALKNVIEPIFEAEFLDSSFGYRPGKSAK | 714820/20258 . . |
| | QAIEQIETVRDEGHEWVVDADIKAFFDTVNHEKLIDAVAERISDG | 22206/uncultured |
| | RVLGLIRAFLEADIMEQGQGRAKNVVGTPQGGVISPLLANIYLHY | archaeon/ |
| | FDERMALGFEVVRYADDVLVLCGSEEEAEEAISHVKEILEELELT | Unclassified |
| | LHPQKTKIKNFSEGVDFLGFTV | |
| 8585 | GVDNQTLDDIREEGIEQLLEQIQHELKTGTYRASCVRRVFIPKSS | >AC_fig\|115547. |
| | GKLRPLGIPTVKDRIVQQAVKLIIEPIFEADFLEFSYGYRPNRSA | 10.peg. 1390\| |
| | KDASLEIYKWLNYGLTNIVDVDIEGFFDHIDHELLLKFVKERVTD | [uncultured |
| | GYILSLIKQWLKAGIVYGKSVTNPTEGTPQGVSFLR | archaeon\| |
| | | 11554710] |
| 8586 | GVDGETIEDIENRGVDQFLTEIQQQLRMKTYRIPKVKRVFIPKGD | >AC_fig\|115547. |
| | GKLRPLGIPTIRDRVVQQAVKSIIEPIFEADFKDCSFGYRPGRSA | 10.peg.767\| |
| | MQASEKIRHLLNLGYTNIVDMDIKGFFDHIDHEKMVFSVMKRITD | [uncultured |
| | PYVIKLIREWLRAGIVFQGNTSYPEQGTPQGGVISPLLANIYLNE | archaeon\| |
| | LDSLWTRRGMESPLKHSAHLVRYADDLLALTNKDPQAVAETLERI | 115547.10] |
| | ISLLGLEPNREKSSVITAEDGFDFLGFHFI | |
| 8587 | GVDGERFEDVEAYGVERWIGELAETLRKKMYQPQAVKRVYIPKPG | >DS_gi\|3442004 |
| | GKMRPLGIPTLRDRVVQTATMMVIEPIFEADLQPEQYAYRAGRNA | 32\|ref\|YP_00478 |
| | LTAVREVHSLLKTGHKQVVDADLSSYFDTIPHAELMKSVARRIVD | 4758.1\|Acidithiobacillus |
| | RHLLHLIKMWLDAPVEEGDGRGNMQRTTVNRDQGRGTPQGAPISP | ferrivorans |
| | LLSSLYMRRFILGWKQRGYEERFGSRIVCYADDLVICCRWQAEQA | |
| | MAAMQDMMGRLKLTVNAEKTRICRVPEAYFDFLGYTF | |
| 8588 | GVDRQDFEDVEAYGVRRWLEELALALKEESYRPDPIRRVFIPKAN | >DS_D.a.I1/CP0 |
| | GKLRPLGISTLHDRVCMTAAMLVLEPIFEADLPDEQYAYRPGRNA | 00089/759875 . . . |
| | QQAAEEVKNRLYLGQTDVVDADLSDYFGSIPHSELMKSLARRIVD | 761862/ |
| | RRVLHLIKMWLECAVEETDQRGRKKRTTEAKDQGRGIPQGSPISP | Dechloromonas |
| | LLSNLYMRRFVLAWKKLGLERSLGSRIVTYADDLVILCKCGKAEE | aromatica/ |
| | ALQWMRTIMGKLKLTVNEEKTRICQVPAGTFDFLGYSF | BacterialF |
| 8589 | GVDRQDFAEVEAYGVQKWLGELALALRLETYRPDSIRRVFIPKAN | >DS_gi\|2961637 |
| | GKLRPLGISTLRDRVCMTAAMLVLEPIFEADLPPEQYAYRPGRNA | 94\|ref\|ZP_06846 |
| | QQAVIEVEERLHRGQTDVVDADLADYFGSIPHAEMMLSLARRIVD | 488.1\|Burkholderia |
| | RRVLHLIKMWLECPVEETDDRGRQKRTTEARDSRRGIPQGSPISP | sp. |
| | LLANVYMRRFVLAWKKLGLQRSLGSRIVTYADDLVILCKKGKAEE | |
| | ALLNLRQIMGKLKLTVNEEKTRICKVPEGEFDFLGFTF | |
| 8590 | GVDGITFEQIDASGLEAWLAGLRDELVTKTYRPDPVRRVMIPKPG | >DS_gi\|3549604 |
| | GGERPLGIPTIRDRVVQAAAKIVLEPIFEADFEDGAYGYRPRRNA | 51\|dbj\|BAL1313 |
| | VDAVKEVHRLMCRGYTDVVDADLSKYFDTIPHSDLLKSVARRIVD | 0.1\|Bradyrhizobium |
| | RNVLRLIKLWLRVPVEERDSNGKRRMSGGKSNKCGTPQGGVISPL | japonicum |
| | LSVIYMNRFLKHWRLSGRCEAFHGQIISYADDFVILSRGHAEDAL | USDA |
| | TWTKAVMTKLGLTLNETKTSVKNARLESFDFLGYTL | |
| 8591 | GVDGMTFGQIEGAGVDAWLAGLREDLVSKTYQPDPVRRVMIPKPG | >DS_Ni.ha.I1/C |
| | GGERPLGIPTIRDRVVQAAAKIVLEPIFEAGFEDSAYGYRPRRSA | P000320/75444 . . . |
| | IDAVKETHRLLCRGYTDVVDADLSKYFDTIPHADLLRSVARRVLD | 77354/Nitrobacter |
| | RNVLRLIKLWLQVPVEERDGDGKRHMSGGKSSTRGTPQGGVASPL | hamburgensis/ |
| | LSVIYMNRFLKHWRLTGRGEVFHAHVISYADDFVILSRGHAEEAL | BacterialF |
| | TWTRAVMTKLGLTLNEAKTSVKNARREGFDFLGYTL | |
| 8592 | GIDDFTIEEIEAYGVQKFLDEIEDQLRNKKYQPKAVKRVYIPKAN | >DS_S.ag.I2/AE |
| | GKKRPLGIPTVRDRVVQTAVKIVIEPIFEADFQEFSYGFRPKRSA | 014217/10188 . . . |
| | NQAIREIYKYLNYGCEWVIDADLKGYFDTIPHDKLLLLVKERVTD | 12210/ |
| | KSIIKLLSLWLEAGIMEDNQVRSNILGTPQGGVISPLLANIYLNA | Streptococcus |
| | LDRYWKNNRLEGRGHDAHLIRYADDFVILCSNNPKKYYQYAKQRI | agalactiae/ |
| | DKLGLTLNEEKTRIVHATEGFDFLGYTL | Unclassified |
| 8593 | GIDGVTFEAVEEKEGVSAFIAELEDALRNKTYQPDPVKRVMIPKS | >DS_gi\|3224179 |
| | DGSQRPLGIPTIRDRVAQMAVKLVIEPIFEADFCESSYGFRPKRS | 44\|ref\|YP_00419 |
| | AHDAVDDVAYSMNTGYTEVIDADLSKYFDTIPHANLMAVIAERIC | 7167.1\|Geobacter |
| | DGAILHLIQMWLKAPIMEVDKDGTKRNIGGGKGNRKGTPQGGVIS | sp. |
| | PLLANLYLHILDRIWERGNLQQRLGARIVRYADDIVILCRRAKAD | |
| | KAMATLRYVLERLGLSLNEAKTTTVNAYKDKFDFLGFTI | |
| 8594 | GIDGVTFTAIEAGIGKDAYVAALREELEQKTYRADGVRRVWIPKP | >DS_gi\|3458701 |
| | DGSERPLGIPTIRDRIVQMAFKLVVEPIFEADFCEHSYGFRPQRS | 11\|ref\| |
| | AHDAIDAIAEALLRGHTQVIDADLSKYFDTIPHAKLMGVIAERLV | WP_139058630.1 |
| | DGPVLGLIRQWLKAPVIEEDERGQHRPTGGKGNRRGTPQGGVASP | \|Thiorhodococcus |
| | LLANLYLHLLDRIWVRHDLERRLGARLVRYADDAVILCRHSTEKP | drewsii |
| | MAVFTAVLEKLDLTLNVQKTHVVDARADGFEFLGFRI | |
| 8595 | GSDGVSFEAIEQGEGVEGFLKGLAEELREKRYRAQPVRRAMIPKG | >DS_gi\|3505548 |
| | DGRERPLGIPTIRDRVVQMAVKLVIEPIFEADFTPHSYGFRPQRS | 47\|ref\| |
| | AHDAIDDIANALWAGHTHVIDADLSSYFDTIPHANLMTVVAERMT | ZP_08923 |
| | DGAILALLKQWLKAPIIGVDDQGKRRTVGGGKANRVGTPQGGVIS | 874.1\| |
| | PLLSNLYLHLLDRIWDRHRLKDKLGAHIVRYADDFVVLCKQGVEE | Thiocystis |
| | PLKVVRHVTDRLGLTLNETKTHVVDAKETGFHFLGFTL | violascens |
| | | DSM |
| 8596 | QCDTSLYQTWLSSIAQDTHSPLKKAELENLLEALHSLSYIPSVAH | >PF_WP_03688 |
| | AIHIPKSDGSYRTLSIPSPIDLYLQRNLINVLYPIIDKTNSPQSY | 5018.1 |
| | AYRKGKGALEAIKQVELLKRKLGKKYYVVRCDIDNFFDSIPIEQL | [Porphyromonas |
| | MGMFQNITRDPLLSRMVRLWIKSGVVDNKSHFHPHLQGLPQGSPL | gingivicanis] |
| | SPLLSNFYLTDTDRYISNNITEYFIRYADDILLFIPEHSDPLSSL | |
| | QALSNHLKNQKKLSLNKDFIVTEINSEFSFLGISF | |
| 8597 | VNDALYRKWLSSLAADRDLPMAEAERQDLLEALRVCSYIPQPYHS | >PF_WP_03944 |
| | VNIPKGDGSYRQLHIPSAVDLHLQRSLAGILYPITESLSIAQSYA | 3024.1 |
| | YRKGKGAVAAIRKVQHLLDSLDENYTVVRCDIDNFFDSIPVPSLL | [Porphyromonas |
| | QKVLRTTEDPLLTRMLSLWMKSGVVDRTQQYTPASSGIPQGSPLA | gulae] |
| | PLLSNLYLEDTDRYIAGHITTEFIRYADDLLLFLPERADPLKALQ | |
| | DLSEHLKYRKGLKLNRDFVVSSIKSSFSFLGITF | |
| 8598 | RKWLSSLAADRDLPMAEAERQDLLEALRICSYIPQPYHSVNIPKG | >W_[ |
| | DGSYRQLHIPSAVDLHLQRSLAGILYPITESLSIAQSYAYRKGKG | Porphyromonas_ |
| | AVAAVRRVQHLLDSLDENHTVVRCDIDNFFDSIPVPSLLQKVQRT | gingivalis] |
| | TEDPFLTRMLSLWMKSGVVDRKQQYARASSGIPQGSPLAPLLSNL | 34541577 |
| | YLEDTDRYIAGHITTEFIRYADDLLLFLPEKVDPLNALQDLSEHL | |
| | KYRKGLKLNRDFVVSSIKSSFSFLGITF | |
| 8599 | DTLYRKWLSSLAADRDLPMAETERQDLLEALRICSYIPQPYHSVN | >PF_WP_01381 |
| | IPKGDGSYRQLHIPSAVDLHLQRSLAGILYPITESLSIAQSYAYR | 5267.1 |
| | KGKGAVAAVRRVQHLLDSLDENYTVVRCDIDNFFDSIPVPSLLQK | [Porphyromonas |
| | VQRTTEDPLLTRMLSLWMKSGVVDRKQQYAPASSGIPQGSPLALL | gingivalis] |
| | LSNLYLEDTDRYIAGHITTEFIRYADDLLLFLPEKVDPLNALQDL | |
| | SEHLKYRKGLKLNRDFVVSSIKSSFSFLGITF | |
| 8600 | AIEEVLERHELEPVVDDKGRIMQVDALTELIYTQLSTGVYAPKPT | >PF_WP_01967 |
| | RAIFVPKPKGGKRCIEELEQVDMMVHRLVFNSIAKTIESYQSPLS | 2870.1 |
| | LGYRKGYSRQMARDKVQALIDSGFGWVVEADIESFFDNVPFERLW | [Psychrobacter |
| | QRLATILPQRELQTIALIKKLMQVGYTVSNASGTVVKEHLRFKGL | lutiphocae] |
| | MQGSPLSPVLANLYLAMLDEQINAEHFAFVRYADDVLMFCRSEAD | |
| | ANTTLAWLDQHLSELGLNLSLSKTAITAVNNGFEFLGYRF | |
| 8601 | GAAASRLDRDNDFSASLERDYGSIGNAVFAMRDHILNGEFQCSPA | >PF_WP_02718 |
| | APFEINKPLGGRRTLGTFSSEDSLAQKLLHRLLSPVLDRMFEHSS | 0402.1 |
| | VGFRKGRSREDAKRMIQQAIRQGCRYVFESDIDSFFDDIDRSTML | [Desulfovibrio |
| | RKLRGVLPQADKMTFRALESCINAGLENEVDSTKGLVQGSSLSPL | bastinii] |
| | LSNLYLDSVDERMDEHGYRFIRYADDFVVLAHSEDEWRKACEDMQ | |
| | DSLEPLGLQLKEGKTHISCIDPGFKFLGIEL | |
| 8602 | GAAASKINRDSDLSSELERDYGSIEKAVFEMRDRILMGEFTCSAA | >W_[Desulfovibrio_ |
| | VPFEMHKPYGGSRIIGTCPPEDTLTQKLLHQLLSPVMDRMFEHSS | hydrothermalis]_ |
| | VGFRKGRSREDAKRMIRQAIREGCRYVFESDIDSFFDEIDRPTML | (2)436839745 |
| | RKLQDALPQADHMTFKALKSCVNAGLVDEDRQDAKGLVQGSSLSP | |
| | LLSNLYLDGVDERMEELGYRFIRYADDFVVLARSKEECRKAYEDM | |
| | RLTLAPLGLSLKEQKTRISNIDPGFRFLGIDL | |
| 8603 | DLAVRLSNTPQAPDLHELAVELAQNLREGAAPLPFQAIRVPRSDG | >PF_KFB71594.1 |
| | RLRQFETPAARDLVILNHLTRLLSEPFDRLFSVHSIGYRKGHSRE | [Candidatus |
| | DAVERVRAAIAEGCTHVLESDISDFFPSVDLKRLLARLDDVLPRR | Accumulibacter |
| | DVRLRQTLAAYLGAGWRYGEGSVQARNRGLPLGSPLSPLLANLYL | sp. BA91] |
| | DSFDSQLGATVPGVRLIRYADDFIILTESEAAARALLDTARDAAA | |
| | ALGLALNLEKTAIRPLSDGFDFLGIRF | |
| 8604 | YTPAPNTAFLIKKKSGVDRMVEQIALKDLILQQYLLKTIGNEFER | >PF_KFZ44108.1 |
| | IFEPESIGFRKGISRQRAVEMVQAALKAGYQFIIESDVDDFFPSV | [Smithella |
| | DLKILTGLLDRYLPQEDHRIKELLTKTIHNGYVLNGQYHERVRGV | sp. D17] |
| | AQGSPLSPMLANLYLDYFDETIKGWPVRLIRYADDFIILTRTKEE | |
| | AEEYLSRTESCLSEIGLKIKKEKTGIKHIREGFRFLGIKF | |
| 8605 | ALQALSETEKYPFDENQYAENLFQLIVSNGYLPTPHIAFTIKKKS | >PF_KKO19838.1 |
| | GVDRVVEQLSFRDLIVQQYLLKVISTVFDRFFEAESIGFRKGVSR | [Candidatus |
| | QRSIGMIQSAIAEGYQCVIESDIEDFFPSVDLDILEHLLDCSIPQ | Brocadiafulgida] |
| | NDVCLKNILLKLIRNGFILNGTYYERRKGLAQGGPLSPILANLYL | |
| | DSFDEQIKRWGLASHDEDAGTDHAKGGAGNKTAGGNASRGVKLIR | |
| | YADDFIILTRTKEEAEGVLSDTESYLSTLGLKIKKEKTAIRSLRD | |
| | GFHFLGIRF | |
| 8606 | VEQIPFRDLIVQQYLLKIISAPFDRFFEAESIGFRRGVSRQRSIE | >PF_WP_05256 |
| | IIQAAIAEGYQYVIESDIEDFFPSVDLNILAHLLDSYIPQNDSCL | 5451.1 |
| | KKILLKFIKNGYILNGVYHERVKGLAQGSPLSPILANLYLDSFDE | [Candidatus |
| | QIKQWGLLSPDEHGETASDSKDTPSRAAPAHTPRGVKLVRYADDF | Brocadiasinica] |
| | IILTKTKKDAEDVLSETEAYLSKLGLKIKKEKTAIRSMKDGFQFL | |
| | GIRF | |
| 8607 | GLLQRQTRLIAGDLDRFLAELSASLRGGTYLPAPLLRADIPKRAP | >PF_WP_05358 |
| | GQTRVLHIPTIRDRVVERAVVNAVAHDADRIMSPCSFAYRTGIGT | 7381.1 |
| | DDAVHHLATLRDDGYRHVLRTDVEDYFPNLDVEDALTVLAPVVGC | [Actinomyces sp. |
| | PRTIDLIRLIARPRRARGERRTRSRGIAQGSCLSPLLANLVLNDV | oraltaxon |
| | DHALNDAGYGYARFADDIVVCAPARDDLLAARELLGSLVAAHGLN | 414] |
| | LNEEKTAMTTFDEGFCFLGVDF | |
| 8608 | GVLQRQSKRIIENADEFLNQLSALLRNGTYEPEPLNRVDIPKGEH | >PF_ENO18597.1 |
| | GKTRTLNIPTIHDRIVERAIVDTIAFTADLVQSSCSFAYRTGIGV | [Actinomyces |
| | DDAVHHVATLREEGYQYVLRTDIEDFFPHVNLEHALEALPESLQE | cardiffensis |
| | RDLLALLRIVALPRRAHGQRRARSRGVAQGSTLSPLLANLSLTRF | F0333] |
| | DHDICDAGYGYARFADDIVVCSPREQDILDAIELLSDLAAAHGLK | |
| | LNQDKTIMTTFDEGFCYLGVDF | |
| 8609 | RADIADCFEQIPRWPVVTRVKELVPDAEPCLLIQHLIARDATGPA | >PF_WP_02038 |
| | ARRVWSGRRRSRGLYQGSALSPALADLYLGAFGKAMLWAGRQVLR | 0191.1 |
| | YADDFAIPAGSRTEAESALTTAEDVPAEWGPELNGAKSRIVSFDE | [Nocardiopsis |
| | GVDFLGRTV | potens] |
| 8610 | GVKSTAVQEFEKGALRRLLDISEQLREGTYAPEPVTAFEVPKPSG | >PF |
| | EARLLGIGTVGDRVVERAVLAVIEPCIDPVLLPWSFAYRKGLGVP | WP_083934465.1 |
| | DAVQALAEARESGSTWVLRADFADCFETIPRWPVITRLHELVPDA | [Nocardiopsis |
| | ELCLLVQHFIQRKSRGPGARRLRPGSGRGLHQGSALSPLLSNLYL | baichengensis] |
| | DSFDRALLQRGRQVLRYGDDFAVPSESRHAAEQALAQATEAAREW | |
| | GLELNAAKSQIVSFDEGVRFLGRTV | |
| 8611 | GQPDSEVDAFEANAARNLDELGTVLAAGEWQASPVRRVDLPKPSG | >PF_WP_05291 |
| | GVRVLGVPRLVDRIVERALLRVLDPVIDPLLLPWSFAYRRGLGAR | 4180.1 |
| | DALAALAEARDSGMTWVARSDIRDCFPSIPQWEVLRRLREVVDDE | [Frankia |
| | RIIHLVGVLLDRPVAGGRTDPKNRGLGLHQGSALSPLLSNLYLNA | sp. BMG5.1] |
| | FDRAMLRAGFRVIRYSDDFAIPTTGRVAAEQALVSASTELEDLRL | |
| | EINSGKSHVVSFDEGVRFLGEVT | |
| 8612 | TRVSIPKPDGGIRSLAIGAIEDRIVERAVLDVLDPVVDPTLSPWS | >PF_KXK58998.1 |
| | FAYRRGLGVRDAVRALAEARESGLAFVVRCDIDDCFDSIPRWPLL | [Micromono |
| | RRLRELVSDAELVALVERLVGRPVTGERASGGRGLHQGGSLSPLL | sporarosaria] |
| | ANLYLDTFDRALMRHGHRVVRYGDDIAISVPDRPTGLRVLDLADA | |
| | EAEALSLRLNTDDRQVIAFDEGVPFCGQVV | |
| 8613 | GRVPVSVRRFERGVAASLVRLSGELSSGRYQPSRVSEVSLRTGSG | >PF_WP_052104813.1 |
| | SERVLRIGAVVDRVVERSLLNALTPVIDPLLSPFAFGFRRGLGVK | [Cellulomonas |
| | DAVAALARARDEGSTHVLRSDIAAAFDSVPRARAVQALSRLVPDR | bogoriensis] |
| | RVCDVVASLLARLDDYGLEGVGIAQGSAVSPLLLNLYLLPFDEAL | |
| | MANGFTPLRYADDIAVPAMSESQAQSAAQDVAHQLECLGLACSAP | |
| | KTSIRSFDEGVHFLGVTL | |
| 8614 | GNLAPSILKFQEDAEEKILRLSEALLDGSYKPYQFTEVDIETNGK | >PF_WP_00606 |
| | ERTLHIPAVQDRIVARAILATTTSRIDPLLGASAFGYRPGLGVAD | 3846.1 |
| | AVQAVVDAREAGLKWVLRTDVDDCFPSLSPDIAFDRFTQAVHDTD | [Corynebacterium |
| | ITDVVEQLLGRTVGNGKMRGTTLPGLPLGCPLSPVLMNLVLVDLD | durum] |
| | DALNAAGFTVVRYADDIVVVGESKEELEDAARFCQRILRSFNMQL | |
| | GDDKTDIMTFDDGFAFLGEDF | |
| 8615 | AVLVPGPTRPDLPGQGVKVDQWSYTTLVDLTEGLRWVCRCDIDNC | >PF_ACV77640 |
| | FPSIPKDRLRRKLTALFQGDPTLLGILTRLLARPAGGSPAEALPG | .1 |
| | LPQGSPLSPLWANLILADFDDAVARTGFPLVRYSDDMVIAAADRA | [Nakamurella |
| | EAWEAMRVAHDAAAGIEMSLGADKSAVMSFDEGFTFLGEDF | multipartite |
| | | DSM44233] |
| 8616 | PDRIVARAILDTATPFVDPELGHCAFAYRPGLGVADAVQAIARQR | >PF |
| | EEGLGWVLRTDIDECFPTLPVDLAHRRLAALVDDDDLASVLTALS | WP_211223266.1 |
| | ARPYRTATRALRAVTGLPQGCPLSPVLANLVLVDVDRALLDRGYA | [Propionicicella |
| | PVRYGDDIAIPCANEDDAWEAARVTSEAAERLDMSLGSDKTHAMS | superfundia] |
| | FTEGFVFLGEEF | |
| 8617 | DQLSAGVRTFGDEADQRLAGLAEQLAGGMYLPGVLTELVMVTEDG | >PF_WP_05239 |
| | GQRVLRVPAVRDRVVERALLSVLSPRLDPLLGPASFGFRPGLGVV | 6493.1 |
| | DAVQALARLRDEGFGWVLRTDLHDCFPSVDLRRVRRLLEVLTSDG | [Kutzneria |
| | DLLGVLDLLLARAARRPGEQTLRPAHGLPQGSSLSPLLANLVLED | sp. 744] |
| | FDDRMRHAGFPLVRYADDIAVLASSEREAWEAARVASAAAKEIGM | |
| | TLGADKTEIMSFDGGFCFLGEDF | |
| 8618 | GVERFAEDPKAELDELGEQLRTGTYRPRDLTEVVIDDGGGSRTLH | >W_[Microlunatus |
| | IPAVRDRVVERSLLNVVTPWVDPVLGFTSYAYRPGLGVADAVQAL | phosphovorus] |
| | VTLRSEGLGWVLRTDVDDCFPSVPVDHARRLLGALVPDADLLAIV | 336116789 |
| | DLLLARAAVRPGRGRGVMRGLAQGCALSPLLTNLVLTALDDALLD | |
| | EGFAVLRYADDICVATETRDDAWEAARIATAALEVLGMELGADKT | |
| | EVMSFDEGFSFLGEDF | |
| 8619 | ALDQAASKWDLGGGEVQSAARDLVKGTYQPQPCFRLDIPKSNGDR | >W_[Pirellula |
| | RQLAIPSRLDRVLQRSILDVIAPALELFFEESSFAYRRGLGRHTA | staleyi] |
| | ARHLSQAFTDGYRWALHADFFDFFDTIDHKLLRRRLAAYLADPSL | 283778924 |
| | VEVIMRWVETGAPHPDHGIPTGAPLSPILANLFLDQFDEAMHSVG | |
| | RRLVRYADDFVVLFRDQSEAQAVISEVRQAAESLRLELNRDKTHT | |
| | LHLATSFDFLGLHF | |
| 8620 | IEKKPTIDKLTERTHSQINSALGQIIKQDYNAPAMQGFTIPKKDG | >PF_WP_03813 |
| | SERLLAVSPLYDRVLQKAAAIILTPGLDALMAQGSYGYRKGLSRQ | 7810.1 |
| | QVRYEIQNAYRQGYHWVYESDIEDFFDAVNRKQLLNRLQSLFGKD | [Thiomicrospira |
| | PIWKQLEDWLGQEIHYQETIVERTPHTGLPQGSPLSPVLANFVLD | sp. MilosT1] |
| | DFDSDMELHGFKMIRFADDFIILCKSRHEAELAALGVQHSLKQVS | |
| | LDINRDKTHIVELSQGFRFLGYLF | |
| 8621 | DTDEEHHDAIDELLTKLYVSRERIFKREFTPSQLHSVEIEKPEGG | >W_[Marinomonas |
| | TRLLSVPNWHDRTLQKAVTECLGNTLEHIWMKHSYGYRKGHSRLQ | mediterranea] |
| | ARDQINQYIQQGYEWVLESDIESFFDSVNWLNLEQRLKLLLPNEP | 32 |
| | LVPLLMQWVSAAKQTEDEQTLARHNGLPQGAPISPILANLLLDDL | 6793969 |
| | DQDMIAKGHQIVRYADDFVLLFKSKAAAESALDDIITALKEHHLA | |
| | INLEKTRIVEASQGFRYLGYLF | |
| 8622 | SFNITATEFRTTLYQQLAAIRACRYHPHPLVPVTIAKKDGTDRFL | >PF_WP_02888 |
| | AVPPVGDRALQRVVTAQLSAELDPLFIQHSFGYRKGYSRQGARDA | 3449.1 |
| | INQAIRAGYGWILESDIDSFFDSVAWSQMATRLRLFMGQDPLVDL | [Teredinibacter |
| | IMQWLQTPVQETPAASAPAPRCAGLPQGAPISPLLANLLLDDFDQ | turnerae] |
| | DMIVQGMKLVRFADDFVLLFKHQQQAQQALPRVVQSLAEHGLALK | |
| | PEKTRIVSAQQGFRYLGYLF | |
| 8623 | SLDSQFSEQERNQYKNKVIGLSHTILAGDYKAPVLTQVEIDKSDG | >PF_WP_03818 |
| | GVRTLSIPPLADRILQKAIARPLAVSLDGLWKTHSYGYRKDLSRH | 8758.1 |
| | DAKFAINQAIQQGYEWVLESDVDSFFDNVDWRNLQTRLKLLLPND | [Vibrio |
| | FLVDVIMAWVKAPVKTPSGQILERTQGLPQGSPLSPLLANLVLDD | sinaloensis] |
| | FDADMLALDYKLIRYADDFVLLFKKQSEAQMALDHVIASLNEHGL | |
| | NIKAKKTQIVHANKGFRYLGFWF | |
| 8624 | SLDNPLSEQQQREVLQSVMTGSECLIHQRYPVPTLQQVEIEKEEG | >PF_WP_05504 |
| | GTRTLSIPPLIDRILQKAVARPLAASLEGLWKSHSYGYRSGLSRH | 3549.1 |
| | DAKLAINQAIQNGYEWILESDVESFFDNVDWHNLETRLTLLLPND | [Vibrio |
| | ALVDTIMAWVKAPIKTVTGEYQQRQQGLPQGSPLSPLLANLILDD | metoecus] |
| | FDADMLALDYQLVRYADDFVLLFKTEQQAQAALHRVIDSLNEHGL | |
| | KIKAQKTHIVHAKTGFRYLGFWF | |
| 8625 | SETQKQHTLTQLRQQCAQLLEGTFTAPTLQQVDIDKDDGGTRTLS | >PF_WP_04787 |
| | IPPWQDRVLQKAVASLLNEAFDPLWKHQSYGYRKGRSRFNAKDAI | 5592.1 |
| | NDAIRQGYEWALESDVDSFFDSVCWTNLAARLHLLFPSDPLVPVI | [Photobacterium |
| | MNWVKAPIRTPDGDEIPRTQGLPQGSPLSPLLANLILDDFDGDML | aphoticum] |
| | ALDYQLVRYADDFVLLFTSQQQAQQALPHVIASLNEHGLTLKARK | |
| | THIVEAKKGFRYLGFLF | |
| 8626 | ECDLSQYECNEETDAEGDQAELPPTLLKRANALAQGRYDVPPLRG | >PF_WP_01960 |
| | VIIPKTDGEWRALAVAPFFDAVLQRAVAQILAPSLDRVMDNRSYG | 6016.1 |
| | YRRGRSRLDAKEQIQLAYRNGARWVLEADIEDFFDSVAFSLVAQR | [Teredinibacter |
| | LRALFHQDPINEAILAWLSAPVDYDGLRLQRKAGLPQGSPLSPVL | turnerae] |
| | ANLLLDDFDSDMRKAGFNCLRFADDFVVVCQSREEAERAWQRAAS | |
| | SLNEHGLFLAENKTRVISFERGFRFLGYLF | |
| 8627 | GVEWIDADEQEPDAQDGAEAEADELAAPIEDLTRAIGHLQEGKYR | >PF_ESQ17084.1 |
| | VPELRGYLLPKRDGGLRPLAVPPLRDRVLQRAVQQTLGRGIEPLF | [uncultured |
| | SSGSHGYRPGHSRITAADAIRAAWAQGYRWVYESDVRDFFDSVDL | Thiohalocapsa |
| | QRLRERLEAIYGDDPVVAAVLGWMRAPVRFRGERIERRNGLPQGS | sp. PBPSB1] |
| | PLSPLMANLMLDDFDSDMQAAGFRLIRFADDFIVLCKDPEEARRA | |
| | GEAARASLAEQGLALHPDKTRITAMEDGFRYLGYLF | |
| 8628 | PIDPDDPESMPDPEAEEALADRLEAIGERLRAMRYQAPALKGVVI | >PF_ESQ08042.1 |
| | RDPDGDLRALAIPPFWDRVAQRAVNDCITPACDLLMSEASHGYRR | [uncultured |
| | GRSRHTASLDINRAWQDGYRWVYEADIEDFFDSVDWDKLRLRLEA | Thiohalocapsa |
| | LYRDDPVIDLILAWMAAVVDYQGFSVQRSMGLPQGAPLSPTMANL | sp. PBPSB1] |
| | MLDDLDNDLEQAGFRLVRYADDFVVLCRDRAQAEAAGQEVRRSLA | |
| | ELGLQLNDAKSRVVSFQQGFRFLGFVF | |
| 8629 | GGELWDTEYPEAPDPDEEEELADRLERLGKRLLEGDYRPPALRGV | >PF_CRI67871. |
| | VYRDPDGDLRGLAIPPFWDRVAQRALVERIAPALEGVFSAASHGY | 1 [Thiocapsa |
| | RPGLSRHTASSAIQRAWREGYRWVYEADIEGFFDNLDWQRLAERL | sp. KS1] |
| | RALYRDDPAVDLLLAWMAAPVDYQGMRIERSRGLPQGAPLSPVLA | |
| | NLMLDDLDSDLEHAGFRLVRYADDFVVLCKDQERARAAGEAVRRS | |
| | LAELGLILNESKSRSVSFEQGFRYLGFLF | |
| 8630 | GQSIAAFAAKGAAAIARLSGLLRNGNYAPRPLRLHEIPKPDGGTR | >W_[Rhodobacter |
| | RLAIPAVSDRIVQTAVAAALTPGSSRCFPPTATATAPAVRWRWRW | capsulatus] |
| | TGSRPCGGWATPGWSRPISKRPLTGSRMTRCSRRSIP | 294676824 |
| 8631 | ESKKLPKKLHQSLPHEDFDQLYEQLHQGNYQTGLLTPRLLEKPGQ | >PF_WP_00746 |
| | KRRLLLLPPFIDKVAHKCLSRWLATSLDTLYSANSYGYRKGYSRL | 9744.1 |
| | TAKDRISYLLSQGYKWVVDADIKAFFASIDRQQVAARLQALYGDD | [Photobacterium |
| | TLWPILDKMLNAAIDPNSELPLELSISGLNLGNSLSPILANLMLD | marinum] |
| | HFDDVIREHKLELVRYADDFLILCREQQQANHAKDFVEQLLHSQA | |
| | LSLNPRKTRVTHVNKGFRFLGYLF | |
| 8632 | DEQQALEQQRSDLPEMLQQVLHHDYWPAPLTPWLMQEQGRKERLI | >PF_KUI97421. |
| | LLAEFNDKVLHKTISLWLGASLDQLYSKTSYGYRKGYSRLSAKDR | 1_(2) |
| | IINRIRAGYVYAVDADIRDFFPSVEQSRVLNRLSALYGADPLWTL | [Vibrio |
| | VERFLSAPIRRQHLPAGYEDYERTGLDLGNSLSPVLANLMLDHLD | sp. |
| | AVMESLGYELIRYADDFLVLTKSRDKAQQALHMIEEILTAQGFAL | MEBiC08052] |
| | NHEKTRIRHFSEGIHFLGYLF | |
| 8633 | TDEHKAWEQSRENLPDTLYRCWHLDYWPELLHPRLLQQAGKKERL | >PF_WP_02830 |
| | LLLPPFPDKVIHKTISRWLSDSLDQLYSKSSYGYRKGYSRLGAKD | 2067.1 |
| | RIIHLVRKGYKYALDADITDFFPSVNTNRILGRLAALYGQDPLWQ | [Oceanospirillum |
| | LLERFLHCQIDRQNLPAGYEHHVNQGLNLGTSLSPVLANLMLDHL | beijerinckii] |
| | DSVLNNMDYELVRYADDFLVLCKHKQQAEDARVLIEQLLKQHDLQ | |
| | LNAEKTKVRSFASGIYFLGYLF | |
| 8634 | GVDGITTDLFVGVANEQLAQMHRQLRREVYEASPAKGFYVPKKNG | >PF_KPQ33062. |
| | GQRLIALSTVRDRILQRYLLQSIYPRLEKAFTDSTFAYRPGLSIY | 1 [Phormidesmis |
| | GAVDRVMAIYAPQPTWVIKADIQQFFDNLSWGVLLSQLERLKVAP | priestleyi Ana] |
| | AQVRLIEQQLKAGLILQGQFYRPNKGVLQGGILSGALANLYLSEF | |
| | DRLCQEAEIPLVRYGDDCVAVCHSYLQANRFLAMMQGWLEDIYLT | |
| | LNPDKTRIVGPDEGFVFLGHMF | |
| 8635 | GVDGITVDLFKGIAQEQIRLLHQQMRQERYVASPAKGFYLPKKTG | >PF_WP_00831 |
| | GDRLIGIPTVKDRIVQRYLLQGIYPHLENTFSEATFAYRPGLSIY | 2855. |
| | TAVAQVMTRYRHQPAWVIKADIQQFFDRLSWPLLLHQLDQLPLPP | [Leptolyngbya |
| | VWMRWIEQQLKAGIVIRGHFQRPNQGVLQGSILSGALANLYLNDF | sp. PCC6406] |
| | DRRCLAADIDLVRYGDDCVAVCQSYLEATRSLALMQDWIEDLYLS | |
| | LHPEKTQIIPPGEAFVFLGHRF | |
| 8636 | GIDGIPTDLFAGVVDEELSLLQRQLQQEYYQADPAKGFYRQKKSG | >PF_WP_024971209.1 |
| | GNRLIGIPTVRDRIVQRLLLHSIYPALEDVFSDRSYAYRPGLGVQ | [Microcystis |
| | SAIAHLSEVYAGQTVWTIKADVSRFFDSLNWALLLTRLERLSLEP | aeruginosa] |
| | VIVRMIEQQIKSGIVIDGQKLRQTKGVLQGGILSGALANLYLSDF | |
| | DARCVGLNLDLVRYGDDFVIVTSGLLEATRVLDSLHHWLADIYLA | |
| | LQPEKTRIIAPDGEFTFLGYQF | |
| 8637 | GFYRVKKSGGHRLIGIPTVRDRIVQRLLLRSLYPILEETFQDCSF | >W_Arthrospira |
| | AYRPGVGVKHAIERVAEVYSSQTWTIKADISQFFDSLCRTLLLSQ | platensis |
| | LEELSVDQTVVRYIKGQLEAGIVVGGMPILSGRGVLQGGILSGAL | 479129286 |
| | ANLYLSEFDRRCLDAGAYLTRYGDDFVIVARSLLEATRFLNLIED | |
| | WLSDIYLTLQPEKTHIFAPGEEFVFLGYGF | |
| 8638 | GITTDLFAGVKKDELIRLQQELIEEIYQPYPARGFYLPKNNGDKR | >W_[Cyanothece |
| | LLGIPAVRDRVVQRWLLEDLYLPLEEVFTDCSYAYRPGRGIQMAV | sp. _ PCC_7822]_ |
| | KHLYYYYQIQPKWIIKSDIRSFFDSLNWSILLSILEHLKLDPIIQ | 1307592471 |
| | QLVEQQLKSGIVLKGRYFPRNQGVLQGAVLSGALANLYLSEFDRK | |
| | CLEKGINLVRYGDDFVAACQSLGEAERTLNLITQWLERIYLQLHP | |
| | KKTEIYAPDQEFTFLGYLF | |
| 8639 | GIDNITVDLFAGVARYQLQVLLWQLQQENYFPRPAKGFYLRKASG | >PF_WP_00735 |
| | GKRLIGIPTVRDRIVQRFLLDELYWPLEDVFLDCSYAYRPGRGIQ | 5619.1 |
| | MAVKHLYSYYQFGQAWVIKADIEKFFDNLCWPLLLTDLEKLQFEP | [Kamptonema |
| | TLRQLIEQHLASGIVVKGQHFHPNQGVLQGGILSGALANLYLNEF | sp.] |
| | DRLCLSHGFNLVRFGDDFAVACADSIQANRCLEQINSWLGSFYLK | |
| | LQPEKTRIFAPDEEFTFLGYLF | |
| 8640 | GITTDLFAGVAKEQLYSLQRQLQQEHYAAHPALGFYLRKTRGGKR | >W_[Microcoleus |
| | LIGIPVVLDRIVQRLLLEELYLPLEDTFLDCSYAYRPGRGIQMAV | sp. _ PCC_7113] |
| | QHLESYYQFQPTWVIKADIAQFFDNLCHALLFTHLEQLQLEPIVL | 428314604 |
| | QLIEQQLKAGIVIKGQRLFPQKGVLQGAVLSGALANLYLTEFDRQ | |
| | CLSHGLNLVRYGDDFVVVAPDWIQANRALEQITTGLAQLYLTLQP | |
| | EKTKIFAPDEEFTFLGYQF | |
| 8641 | GISIGFFESMATEQLRNLVSQLQYGTYTASPAKGFYVPKKNGGKR | >W_Calothrix |
| | LIGIPTVRDRIIQRLLLDELYFPLEDTFVDCSYAYRPGRNIQQAV | parietina |
| | QHLYRYYQYQPKWIIKADIVEFFDNICLALLLNALEKLRLEPNIL | 428297029 |
| | QLIEQQIKSGIIINGQYQNAGKGLLQGGTLSGALANLYLTDFDQK | |
| | CLNQGINLVRYGDDFVIACSNFAEANRVLDKITGWLGGVYLTLKA | |
| | EKTEIFSPDDEFTFLGYRF | |
| 8642 | GISVDLFESMATEQLQNIAYQLKEETYTANPAKGFYIPKKNGTKR | >W _[Nostoc |
| | LIGIHTVRDRIIQRLLLDELYFPLEDTFLDCSYAYRPGHSIQQAV | sp. |
| | QHLYGYYQYQPKWIIKADVADFFDNLSWALLLTYLEELSLEPSLL | PCC_7120] |
| | QLLEQQLKSGIIIAGQYRNFGKGVLQGGILSGALANLYLTSFDRK | 17228961 |
| | CLSQGINLVRYGDDFVIACNSWLEANRILDKITGWLGEVYLTLQP | |
| | EKTQIFTPNDEFTFLGYRF | |
| 8643 | GISVELFESMATEQLQNIANQLYDETYTASPAKGFYIPKKNGSKR | >W_Calothrix |
| | LIGIPTVRDRIIQRLLLDELYFPLEDTFLDCSYAYRPGHNIHQAV | sp. 427717966 |
| | QHLYGYYQYQPKWIIKTDIADFFDNLSWALLLTALDELSLEPIVL | |
| | CLLEQQLHSGIIIAGQYRNFGKGVLQGGILSGALANLYLTNFDRK | |
| | CLSQSINLVRYGDDFVIACNSWQEANRILDKITTWLGEVYLTLQP | |
| | EKTQIFTPNEEFTFLGYRF | |
| 8644 | GVDGISLDLFESVAAEQLRNIEYQLHHETYTASPAKGFYVPKKNG | >PF_WP_02963 |
| | DKRLIGIPTVRDRIVQRLLLEELYFPLEDTFLDCSYAYRPGRNIQ | 0506.1[[Scytonema |
| | QAVQHLYSYYQLQPKWVIKADIAEFFDNLCWALLLTALEDLQLES | hofmanni] |
| | IVLQLLEGQLKSGIVIAGKPVYPGKGVLQGGVLSGALANLYLTNF | UTEXB1581] |
| | DRKCLSHGINLVRYGDDFAIACTSFHEANRILDKITTWLGELYLQ | |
| | LQPEKTQIYAPDDEFIFLGYRF | |
| 8645 | GVDGIDVDLFASAVNDQLRILLRQLQQESYCASPAKGFYLAKSSG | >PF_WP_03333 |
| | GKRLVGIPTVRDRIVQRLLLEELYFPLEDTFLDCSYAYRPGRNIQ | 4699.1 [Scytonema |
| | QAVQHLYSYYHLRPKWIIKADIAEFFDSLSWALLLTALEKLPLEP | hofmannii] |
| | IVVQLLEGQLRSGIVINGKPIYPGKGVLQGGVLSGALANLYLNEF | |
| | DKKCLHQGINLVRYGDDFAIACSNWREATRTLDKVAAWLGELYLN | |
| | LQPEKTQIFAPDDEFTFLGYRF | |
| 8646 | GVDGMTVDLFAAGVNEQLRILLRQLQQESYRASPAKGFFVAKKSG | >PF_WP_04103 |
| | GKRLIGIPTVRDRIVQRLLLEELYFPLEDTFLDCSYAYRPGRNIQ | 9832.1 |
| | QAVQHLYSYYQYQPKWIIKADIAEFFDNLCWALLFTALEDLQLEP | [Tolypothrix |
| | ILLQLLEQQLKSGIVIAGKPIYPGKGVLQGGVLSGALANLYLTSF | campylonemoides] |
| | ERKCLSYGINLVRYGDDFAIACSSWLEANRILDKITTWLGELYLN | |
| | LQPEKTQIFAPDDEFTFLGYRF | |
| 8647 | GISVDLFAASVDEQLTILLRQLQQESYHPSPAKGFYLTKKTGGKR | >W_Anabaena |
| | LVGIPTVQDRIVQRLLLEELYFPLEETFVDCSYAYRPGRNIQQAV | cylindric |
| | QQLFSYYQYHPTWIIKADIAQFFDNLCWALLLTNLEALQLESRIL | 440685177 |
| | QLLEQQLKAGIIIAGKHINFGKGVLQGGIISGALANLYLTIFDRK | |
| | CLSNGINLVRYGDDFAVACSSWKEANRILDKIIAWLGELYLTLQP | |
| | EKTQIFAPNEELKFLGYRF | |
| 8648 | GVDGITVDLFAASADQQLRIILRQLQQKSYRASPAKGFYLTKKSG | >PF_WP_04444 |
| | GKRLIGISTVRDRIVQRLLLEELYLPLEDTFVDCSYAYRPGCNIQ | 8019.1 |
| | QAVQRLFSYYQYHPTWIIKADIAQFFDNLSWALLFTGLETLHLEA | [Mastigocladus |
| | IVLELLEQQIKSGIVLGGKYINFGKGVLQGGILSGALANLYLTAF | laminosus] |
| | DRKCLSHGINLVRYGDDFAVACSSWTEANRILDKITTWLGGLYLT | |
| | LQPEKTQVFAPHEEFTFLGYRF | |
| 8649 | GVDCQSIASFESELQLGLNSILYDLRQQHYTPAALKRSQLKLPGK | >PF_WP_04600 |
| | KPRWLAFPTVRDRIVHTAIAILLQPYFEEEFEHNSYGYRPGRSYI | 7427.1 |
| | MAVDKVIEHRNQRRRHVFDADIQGYFDHIPQDKLLTKLQATAIDP | [Pseudoalteromonas |
| | TLIELIFTLLFSFQQSNDGLVFGKALGQGIPQGSAICPLLANFYL | rubra] |
| | DELDEHLNALGYHMVRYADDFVVCCDSAKAAQHAQYHTEQVLTHL | |
| | ALTLNLNKTQLTTFADGFKFLGHYF | |
| 8650 | GADGISIKEFASDLDTQLRQLHYDWKNNRYKPYRYRNITIEKANK | >PF_WP_03888 |
| | KPRELAVPTVRDRILHSALAQKLLNIFEAEFEHISYGYRPNRSYT | 4984.1 |
| | HAIRHIEQLRDQGYSTVIDADIQGYFDNICHIKLTELLNRHLPSD | [Vibrio |
| | WVSAITDTLLSQQQADGHLYFGAEIGVGIPQGSPLSPLLANLYLD | rotiferianus] |
| | GFDEALLDRGEQIIRYADDFVILLPNEDRAQSCLAFVTDYLNQLK | |
| | LTLNCEKTKVVSFQDGFTFLGVTF | |
| 8651 | GVTIQTFAIHLDTNLNTLLSAWNHGNYAPSPYRPLTIQPNEKKTR | >W_[Vibrio |
| | QLAIPTVADRIIHTAIAQKLVAKFEPEFEHISYGYRPNRSYTHAI | vulnificus] |
| | RHIEQLRNQGYLYVLDADIKGYFDHICHKRLKQILQKYLEDNWVE | 37677 |
| | SIMTLLLSQQMPAQTLLFGVELGRGIPQGSPLSPLLANLYLDGFD | 204 |
| | EALLDRGEQIVRYADDFVVLVTHEQQAQHCLAFVTQYLASLKLQL | |
| | NTEKTRVVSFQDGFTFLGVSF | |
| 8652 | GPDAVTILDFEAAWVDHMQQLAMELQSQIYRPLPPRRLFLDKRDG | >DS_gi\|1139391 |
| | GKRSIAILAVRDRIAQRAVLQILEPEIEPTFLDCSYGFRPYVGVP | 99\|ref\|ZP_01425057.1 |
| | HALTRIERYRQQGLQWVAHADISDCFGTIDHQILLSQLHQRISDR | [Herpetosiphon |
| | AVVELIGQWLSVGVMEDAATTEASNWWDDGEDLLERLAKHGEDLL | aurantiacus |
| | WPNQYPQAGPSYAPQMLDFEANRTDSLRKRALQGLASNAALWGIT | ATCC23779] |
| | HSKRVISGLRSLAPLFKQVPGGSLTWGAAGIATLALIPLSQRLLR | |
| | QHERGTLQGGAISPMLANIYLDSFDRAMTERGHILVRFADDFVLL | |
| | GAHQAAVEQALADATNVLKRLRLATKESKTGVQHFNDGLTFLGHR | |
| | F | |
| 8653 | GADEQTLAEFAADAEAQLGLLALQLTQGSYRPAPARLIPVAKPGG | >PF_KFB76584.1 |
| | GVRELLLPAVRDRIVQSALARYLADLLEPDFGEASHAYRPGHSVA | [Candidatus |
| | TALHRLQALRDGGLVFVAVCDIHHFFDSVDHRRLFSLLDDLPLER | Accumulibacter |
| | RLREQMKTCVRIEVADVQGQGAWSLARGLAQGSPLSPVLANLFLM | sp. SK02] |
| | AFDAACARAGLALVRYADDCVLACASETEAQSALAFAADALENIG | |
| | LALNTRKSRLASFAEGFEFLGAFC | |
| 8654 | GIDQITLHDFAADWPNQMVRLAEELRDGSYRPLPPRRVAIAKASG | >DS_gi\|7625862 |
| | GERAIAILTIRDRIAQRAVQQVLTPLFEPLFLDCSYGSRLAVGVP | 9\|ref\|ZP_007662 |
| | EAIERVVRYTEQGLIWVIDGDIRAYFDSIDHGILLGLLRQRIDEP | 83.1 |
| | AILHLIAQWLAVGSVHTETPDETLPDSPLVALLRRSGELIHEALN | |
| | APSDPLPTAYDYPDLSRPASPHSGIPTGLFAALSLAQPAFEIARQ | |
| | LTPLLKRIGAQRLAVGGALAVGTVLLSELVHRAQASHDRRGTLQG | |
| | GPLSPLLANIYLHPFDLAMTAHGARMVRFVDDFVVMCPDRTTAEH | |
| | TLVLVERQLATLRLTLNPQKTRIVAYAGGIEFLGQAL | |
| 8655 | GLDAVTLRDFEVDWTRQMAQLADELQQGTYRPLPAKRVAIPKASG | >DS_gi\|1486571 |
| | GERAIAILAVRDRVAQRAVQQVLDPLFDPCFLDCSYGCRPYVGVP | 22\|ref\|WP_01225 |
| | DAIARVQRYADQGLGWVVDADIATCFDSLDQRVLLSLVRQRIDEL | 9222.1\| |
| | PVLKLIAQWLEAGVLQGEAALPGDTPPTPLQRGEAAVRRALSWGA | [Chloroflexus |
| | ERLHPPPPVGPYAAAMWETPGGSIGEDGWAPRQPGLESHLWTAVM | aurantiacus] |
| | LARPVIDGARQALPYLQRIGGRRLAVAGAVAVGALALSEAAARLR | |
| | HASRRGVPQGGALSPLLANIYLHPFDVAMMGQGLRLVRFMDDFVV | |
| | MCATQEEAECALQFAQRQLHILRLTLNAEKTHITAYADGIEFLGA | |
| | AL | |
| 8656 | GADGVTIERYEGNLDLNLRIMRKELTEQTYFPLPLLRILVDKGNG | >DS_gi\|9120151 |
| | EARALCIPSVRDRIVQAAVLQLIEPVLEKEFEECSFAYRKGRSVK | 8\|emb\|CAJ74578.1 |
| | QAVYKVREYYEQGYQWVVDADIDAFFDSVDYSLLLLKFKCYIHDP | [Candidatus |
| | CIQNLVGLWLKGEVWDGKTVTTLKKGIPQGSPISPILANLYLDEF | Kuenenia |
| | DEELTRNGYKLVRFSDDFIILCKNSGMAKESLKLTKKILEKLLLE | stuttgartiensis] |
| | LDEEQVINFDQGFKFLGVIF | |
| 8657 | GVDYQTLAAFADRLHKNLETLRDEVNYETYQPQPLLRIELEKPGG | >PF_WP_02715 |
| | GTRPLSIPTVRDRILQTAVTRVIEPLFEAEFEDCSFAYRKGRSVD | 0711.1 |
| | QALDRIQLLQRQGYHWVVDADIQCFFDSIDHTLLMTMVGKLVTDV | [Methylobacter |
| | GLLRLIEQWLCATVVDGDRRFVLSKGVAQGSPIGPLLSNLYLHHL | tundripaludum] |
| | DEALLDNNLCLIRFADDFLILCKSQDHAEQALELTDSLLGELRLT | |
| | LNTRKTQIVHFNQGFRFLGVQF | |
| 8658 | GYDKQSITDYSWRIEEHLADLGRQLLTNTYEPQPLLKLVMLKPTG | >DS_gi\|6854873 |
| | KLRTLLIPTVMERVAQTAAAIVLTPLVESELGANTFAYRPGLSRM | 3\|ref\|ZP_005882 |
| | TAAREIERLRNLGYNWVVDADISSFFDTVDHPLLFQRFRELCDDE | 02.1 |
| | ELLTLIARWLTAEIVDGQNPKVKNTIGLPQGCPISPMLANLYLDK | [Pelodictyon |
| | FDERMEQEGFKLVRFADDFLILCKSKPKAEAALQLSESALAELKL | phaeoclathratiforme |
| | QLNNEKTRITTFAEGFKYLGYLF | BU1] |
| 8659 | GWDNTSIQDYSLRLEENLKSLSHALLTGTYRQSPLLKLVMLKPDG | >DS_gi\|1193578 |
| | KERVLLIPGVIDRVAQTAASIVLSPIIEAELGNCTFAYRPGISRE | 46\|ref YP_91249 |
| | GAAREIDRLHREGYQWVLDADIRNFFDNVRHDLLFQRLVELVDDK | 0.1 |
| | EMISLLHRWLTAEIVDGLNPRTRNTMGLPQGCPISPALANLYLDR | [Chlorobiumphaeo |
| | FDETMEQQGFKLVRFADDYLVLCKTRPKAEAALKLSESALAELKL | bacteroides |
| | ELHSDKTRITTFAEGFKYLGYLF | DSM266] |
| 8660 | GCDGEEVEQFAQGLLGRLHTLQAEVADGRYVARPLRVVALPKPSG | >PF_WP_00985 |
| | GQRLLAIPGVRDRVLQAAMAHALGRRIEPTLDEASHAYRPGRSVL | 5610.1 |
| | GALAALLALRDQGRSTVLKADVASFFDRIHQPTLLAQLRRFSADP | [Rubrivivax |
| | GLLALVGQVLAAVLDDDGERRLMTRGVPQGSPLSPLLANLYLHPF | benzoatilyticus] |
| | DVGMRAQGFQLIRYADDLVLACLDADEAARAQDAAARALRELHLE | |
| | LNPAKTRIASFVSGFDFLGVRF | |
| 8661 | GGDGEGVATFQAGLDLRLARLAADLLGGTYRPGPWLIAGGAVVAP | >PF_WP_06276 |
| | VADRVVMTAVATGLPDPSSDGDPAAVMARLAALGQQGAVHLLDGT | 3150.1 |
| | ITHVTDLVPHDLLCERLAALGGDARLVDLFGMWLAVADPEDGLGI | [Tistrella |
| | PPGLPVSGLLARLHLGAVAARIAAAGVHLVPAAGEILVLATGAAA | mobilis] |
| | AEDARGRMLALLADHGLYVDVDLPRMIRLDQAGPRLGRIM | |
| 8662 | GVDRESVVHFAKNSEAYLSQLRRSLASGYYHPMPLRQLFIPKKAG | >PF_WP_00962 |
| | GWRELGVPTVRDRIVQHALLNILHPLLEPQFEACSFAYRPGRSHL | 5648.1 |
| | SAVRQIAQWRDRGYEWVLDADVVRYFENILWQRLLDEVAERLAAP | [Pseudanabaena |
| | EVLSLISAWLSVGVLSKEGLMFPQKGISQGSAISPILANVYLDDF | biceps] |
| | DEIVTATGLKLVRYADDFVVMSRSQKRIVEAKDEVADLMNGIGLQ | |
| | LHPDKTRIVDFDRGFRFLGHAF | |
| 8663 | RVPTVRDRIVQQALLNVLHPVLEPQFEPVSFAYRPGRSHKLAVEK | >PF_WP_00651 |
| | VSAWHRRGYDWLLDGDIVSYFDQVEHSRLLSEVDERLGASDFETL | 5493.1 [Leptolyngbya |
| | ALRLIEQWNTVGTLTSAGLVLPERGIPQGSVVSPILANVYLDDFD | sp. |
| | EALQASRFKLVRFADDFVVMGRSQRQAEQAQAKVAELLTTMGLQL | PCC7375] |
| | HPDKTQITNFDRGFRFLGHAF | |
| 8664 | GVDGETIYAFGLHKSRNLTRLLQQVATSTYRPLPLRQFFIPKKSG | >PF_WP_01730 |
| | GWRELGVPTVRDRIVQQALLQVLHPVFEVEFEPQSYAYRPGRSHR | 2244.1 [Nodosilinea |
| | MAVERVAHWRSRGYDWVLDADIVKYFDTLQHPRLLAEVKERLNQP | nodulosa] |
| | WVLALLQGWITAGTLTREGILLPTCGVPQGSPISPLLANVYLDDF | |
| | DELLTQAGHKLVRYADDFVVLARTQQRLVEAQTYVAQLLEGMGLS | |
| | LHPNKTQITTFDRGFRFLGHAF | |
| 8665 | RIPAVADRIVQQALLNVLYPILEPEFEVCSFAYRPGRSHRMAVDQ | >PF_WP_04544 |
| | IHAFSRRGYRWVMEADIFDYFDHIGHRRLLAEVAERLPGQDPSFC | 2561.1[Synechococcus |
| | DLVLQLVQQWIAVGVVTQSGLILPQAGIPQGAVIAPILANVYLDD | sp. |
| | FDEALLRTPLKLVRYADDFVILGQRERQVQKILPEVAQQMAEIGL | NKBG042902] |
| | QLNMSKTRITNFQKGFKFLGHIF | |
| 8666 | AIGHLVEQWIGSGVSTASGLILPNKGVPQGAVISPILANVYFDDF | >PF_BAU44853.1 |
| | DEAIEAAGLKLVRYADDFVILAKSKARIERAYNLVASLLHAMGLE | [Leptolyngbya |
| | LHPDKTRVTTFNEGFRFLGHTF | sp. 077] |
| 8667 | AVDRISALRRMGYTWVVEADIEKAFDRIPHDPVLEALDTALDPAP | >W_[Rhodobacter |
| | GTRALIDLVGLWLAHGSGQLGTPGRGLAQGSPLSPLLSNLFFDGL | capsulatus]29467 |
| | DDRFDSGAARIVRFADDFVILARSEAGAEEARALAEEFVAGHGLR | 6823 |
| | MVSRETRVVGFDRGFQFLGQLF | |
| 8668 | GGDGQTLAQFQRTVLLHLHRLGDDVRAGLYMPGPHRVVSIPKRAG | >PF_WP_01996 |
| | GWRSLSIPCVRDRVLQTAVAQRLQPILEPEFEPESYGYRPGRSVA | 0649.1 [Woodsholea |
| | QAIARVATLRRQGFRWTVDADIERFFDCVPHGPLLERLRPFLGDP | maritima] |
| | GLVGLVEMWLAGAGPHGRGLPQGSPISPLLANLYLDDVDEGLKST | |
| | HTRLVRFADDFVILTRNEDEALQALERARGLLDKLGLSLNLEKTR | |
| | IVPFEGGLDFLGRKF | |
| 8669 | GGDGVTIDAFDAIAEPRLQALHAALASGGYWPAPARVIEAKKPSG | >PF_WP_01995 |
| | GTRTLRIPAIVDRVVQTAAALVLTPILDREFEDASFGYRPGRSVG | 6891.1[Loktanella |
| | QAVARVAYLRNAGYVWTVDGDIRAFFDEVPHAPLLDRVDRVLGCA | vestfoldensis] |
| | RTADLVERWLQVYCDGGRGLPQGMPLSPVLSNLYLDSIDEKIEKG | |
| | GVRLVRFADDFLLLCRSEAVAEGALARMTGILREAGLKIHPEKTA | |
| | IRRFEDATRFLGHMF | |
| 8670 | GESLDAFHIGVEPRLARLAADVRGGTYRPGPYRLLDVPKDDGGTR | >W_[Tistrella |
| | RLAIPCVADRVLMTSAALVMGPMLDATFEPSSHGYRPGRGVRTAI | mobilis] |
| | ARVESLRDQGFHWVLDADITRFFDRVPHDRLLDRLQQATGDARLV | 389875622 |
| | DLVGLWLDGYDREGEAGRGDGLGLPQGSPVSPLLANLYLDTVDER | |
| | IAAAGLHLVRFADDFVILAADEAAAEGARAHVAALLADHGLHLHP | |
| | DKTRVVSFDQGFAFLGKLF | |
| 8671 | RQTLDDFAESLERNLEGLHAALRSASYRPGPIRNVSIPKRDGSPR | >W_[Desulfarculus |
| | RLSIPSVADRVVQTALCQGLTPILEPEMEDASFAYRPGRSVQMAV | baarsii] |
| | ERVGRYFRQGYHWVVDGDIDDYFDSIPHHGLMAVLRRYVDDQDVL | 302343124 |
| | GLIAQWLAHAHAGGVGVSQGSPLSPLLANIYLDDMDERIGRTGAR | |
| | LVRFADDFLLLCKSEERARESLAAMSALLAEYGLGLNPDKTRIVN | |
| | FEQGFEFLGRLF | |
| 8672 | GGDGETIAHFARQAEFRLARLAHELQADLYRPGPLRQISVPKRKG | >PF_KQB14189.1 |
| | EGMRVLSIPCVVDRIAQRATAAVLSAALEPQFSDASFGYRPGRSV | [Rhodobacter |
| | AQAVARVDALRRQGFTWVVDADIKAFFDSVPHAPLAARLHAAGIE | capsulatus] |
| | PQLIELIDLWLDSFSAEGVGLAQGSPISPVLANLHLDALDDSFGP | |
| | RGSVRIVRFADDFVLLTRCRPGAEAALAKARDQLAEAGLRLNLAK | |
| | TRIVPYDQALRFLGHLF | |
| 8673 | GGDGMTVARFALVAESMIQRLAGALRSGQYRPGPARRAFIPKKDG | >PF_EJW09481.1_(2) |
| | GLRPLDIPCVHDRVVQGAATLVLDPVLDKAFADSSFAYRRGRSVA | [Rhodovulum |
| | QAVARIGSLRRQGFTHVVDGDIRAYFERIPHDRLITKLEQHVDDQ | sp. PH10] |
| | AMVDLIWLWLETYSLTGRGVPQGAPISPLLANLYLDAVDDRIERA | |
| | GVRLVRFADDFVLLAKTPASAEKALVEMTRLLAEEGLEIHPEKTR | |
| | LVSFEEGFRFLGHVF | |
| 8674 | GGDGVPLARFLVNAPARIARLSAGLRDGSYAPGPLRRVDIPKKSG | >PF_EJW09347. |
| | GTRPLAIPCVVDRIAQTAVMQALAPRLDEEFAESSFGYRLGRGVR | 1_(2) |
| | DAVKRVAALRGKGHVYVVDADIAKFFESVPHDKLLERLAQSMTDG | [Rhodovulum |
| | PLMRLIGLWIEHGGARGRGLPQGSPLSPLLANLYLDRLDDAFAKR | sp. |
| | GAHIVRFADDFVILAESRHGAEGALVRAEKLLAEHGLSLNREKTR | PH10] |
| | VTSFDQGFRFLGHLF | |
| 8675 | GGDGVTIDRFARRAPQRLTALSGALLDGRYRPGDLRRIDLKKRDG | >PF_WP_06083 |
| | GTRPLAIPSVIDRVAQTAAALVLTPILDPLFDEASFGYRPGRSVA | 6241.1 |
| | MAVRRIDMLRRRGFCHVVEADIVRCFERIPHEPVLSSLAKTLAGR | [Rhodovulum |
| | VGADRLVDLVALWLEHAAMFLETPGLGLAQGSPLSPLLSNLYLDR | sulfidophilum] |
| | LDDALDRRDVAVVRFADDFVLLCRSREAAAKALNRAENLLEAHGL | |
| | ELHGDGTRIVDFDRGFEFLGHLF | |
| 8676 | GLTVGRFAEAAPSRLLALHRTLRMGDYRPGPLRRLSIPKPDGALR | >W_Azospirillum |
| | PLAIPPVTDRVAQTAAALVLTPLLDGEFEDASFGYRPGRSVPQAV | lipoferum |
| | ARVARWRDQGYDWVVDADIERYFERVPHDRLLIRLERSIGAGPLT | 1374998939 |
| | ELIAVWLESGAENGVGLPQGSPLSPLLSNLYLDDLDEALDGRGLR | |
| | LVRFADDFVLLCRSRERAERALDHAAAVLEEHGLRLNRDKTRIVP | |
| | FDQGFRFLGHLF | |
| 8677 | GMTVEEFSIDLPTRLVRLQLALAQGTYRPGRLRRVDVAKEDGGTR | >W_Azospirillum |
| | PLAIPPVVDRVAQTAVAQVLTPLLDPRMHDGSFAYRPGRSVAMAV | lipoferum_ |
| | ARVAEHRRQGFGWVVDGDIERYFERVPHERMMACLARVIDEPPLL | 2288957883 |
| | DLIELWLESFSAMGLGLPQGAPLSPLLANLYLDDIDDRIAARGVR | |
| | LVRFADDFLLMCRGEAAAEDARDRMAALLAEHGLRLHPDKTRIVP | |
| | FEQGFRFLGHLF | |

### Programmable DNA Binding Domain

[0230] In some embodiments, the DNA-binding domain of a split prime editor is a programmable DNA binding domain. A programmable DNA binding domain refers to a protein domain that is designed to bind a specific nucleic acid sequence, e.g., a target DNA or a target RNA. In some embodiments, the DNA-binding domain is a polynucleotide programmable DNA-binding domain that can associate with a guide polynucleotide (e.g., a PEgRNA) that guides the DNA-binding domain to a specific DNA sequence, e.g., a search target sequence in a target gene. In some embodiments, the DNA-binding domain comprises a Clustered Regularly Interspaced Short Palindromic Repeats (CRISPR) Associated (Cas) protein. A Cas protein may comprise any Cas protein described herein or a functional fragment or functional variant thereof. In some embodiments, a DNA-binding domain may also comprise a zinc-finger protein domain. In other cases, a DNA-binding domain comprises a transcription activator-like effector domain (TALE). In some embodiments, the DNA-binding domain comprises a DNA nuclease. For example, the DNA-binding domain of a split prime editor may comprise an RNA-guided DNA endonuclease, e.g., a Cas protein. In some embodiments, the DNA-binding domain comprises a zinc finger nuclease (ZFN) or a transcription activator like effector domain nuclease (TALEN), where one or more zinc finger motifs or TALE motifs are associated with one or more nucleases, e.g., a Fok I nuclease domain.

[0231] In some embodiments, the DNA-binding domain comprise a nuclease activity. In some embodiments, the DNA-binding domain of a split prime editor comprises an endonuclease domain having single strand DNA cleavage activity. For example, the endonuclease domain may comprise a FokI nuclease domain. In some embodiments, the DNA-binding domain of a split prime editor comprises a nuclease having full nuclease activity. In some embodiments, the DNA-binding domain of a split prime editor comprises a nuclease having modified or reduced nuclease activity as compared to a wild type endonuclease domain. For example, the endonuclease domain may comprise one or more amino acid substitutions as compared to a wild type endonuclease domain. In some embodiments, the DNA-binding domain of a split prime editor has nickase activity. In some embodiments, the DNA-binding domain of a split prime editor comprises a Cas protein domain that is a nickase. In some embodiments, compared to a wild type Cas protein, the Cas nickase comprises one or more amino acid substitutions in a nuclease domain that reduces or abolishes its double strand nuclease activity but retains DNA binding activity. In some embodiments, the Cas nickase comprises an amino acid substitution in a HNH domain. In some embodiments, the Cas nickase comprises an amino acid substitution in a RuvC domain.

[0232] In some embodiments, the DNA-binding domain comprises a CRISPR associated protein (Cas protein) domain. In some embodiments, the Cas protein has nickase activity. A Cas protein may be a Class 1 or a Class 2 Cas protein. A Cas protein can be a type I, type II, type III, type IV, type V Cas protein, or a type VI Cas protein. Non-limiting examples of Cas proteins include Cas9, Cas 12a (Cpf1), Cas12e (CasX), Cas12d (CasY), Cas12b1 (C2c1), Cas12b2, Cas12c (C2c3), C2c4, C2c8, C2c5, C2c10, C2c9, Cas14a, Cas14b, Cas14c, Cas14d, Cas14c, Cas14f, Cas 14g, Cas 14h, Cas 14u, Cns2, Cas @, and homologs, functional fragments, or modified versions thereof. A Cas protein can be a chimeric Cas protein that is fused to other proteins or polypeptides. A Cas protein can be a chimera of various Cas proteins, for example, comprising domains of Cas proteins from different organisms.

[0233] A Cas protein, e.g., Cas9, can be from any suitable organism. In some aspects, the organism is Streptococcus pyogenes (S. pyogenes). In some aspects, the organism is Staphylococcus aureus (S. aureus). In some aspects, the organism is Streptococcus thermophilus (S. thermophilus). In some embodiments, the organism is Staphylococcus lugdunensis.

[0234] A Cas protein, e.g., Cas9, can be a wild type or a modified form of a Cas protein. A Cas protein, e.g., Cas9, can be a nuclease active variant, nuclease inactive variant, a nickase, or a functional variant or functional fragment of a wild type Cas protein. A Cas protein, e.g., Cas9, can comprise an amino acid change such as a deletion, insertion, substitution, fusion, chimera, or any combination thereof relative to a wild-type version of the Cas protein. A Cas protein can be a polypeptide with at least about 50%, 60%, 70%, 80%, 90%, 91%, 92%, 93%, 94%, 95%, 96%, 97%, 98%, 99%, or 100% sequence identity or sequence similarity to a wild type exemplary Cas protein.

[0235] A Cas protein, e.g., Cas9, may comprise one or more domains. Non-limiting examples of Cas domains include, guide nucleic acid recognition and/or binding domain, nuclease domains (e.g., DNase or RNase domains, RuvC, HNH), DNA binding domain, RNA binding domain, helicase domains, protein-protein interaction domains, and dimerization domains. In various embodiments, a Cas protein comprises a guide nucleic acid recognition and/or binding domain can interact with a guide nucleic acid, and one or more nuclease domains that comprise catalytic activity for nucleic acid cleavage.

[0236] In some embodiments, a Cas protein, e.g., Cas9, comprises one or more nuclease domains. A Cas protein can comprise an amino acid sequence having at least about 50%, 60%, 70%, 80%, 90%, 91%, 92%, 93%, 94%, 95%, 96%, 97%, 98%, 99%, or 100% sequence identity to a nuclease domain (e.g., RuvC domain, HNH domain) of a wild-type Cas protein. In some embodiments, a Cas protein comprises a single nuclease domain. For example, a Cpf1 may comprise a RuvC domain but lacks HNH domain. In some embodiments, a Cas protein comprises two nuclease domains, e.g., a Cas9 protein can comprise an HNH nuclease domain and a RuvC nuclease domain.

[0237] In some embodiments, a split prime editor comprises a Cas protein, e.g., Cas9, wherein all nuclease domains of the Cas protein are active. In some embodiments, a split prime editor comprises a Cas protein having one or more inactive nuclease domains. One or a plurality of the nuclease domains (e.g., RuvC, HNH) of a Cas protein can be deleted or mutated so that they are no longer functional or comprise reduced nuclease activity. In some embodiments, a Cas protein, e.g., Cas9, comprising mutations in a nuclease domain has reduced (e.g., nickase) or abolished nuclease activity while maintaining its ability to target a nucleic acid locus at a search target sequence when complexed with a guide nucleic acid, e.g., a PERNA.

[0238] In some embodiments, a split prime editor comprises a Cas nickase that can bind to the target gene in a sequence-specific manner and generate a single-strand break at a protospacer within double-stranded DNA in the target gene, but not a double-strand break. For example, the Cas nickase can cleave the edit strand or the non-edit strand of the target gene, but may not cleave both. In some embodiments, a split prime editor comprises a Cas nickase comprising two nuclease domains (e.g., Cas9), with one of the two nuclease domains modified to lack catalytic activity or deleted. In some embodiments, the Cas nickase of a split prime editor comprises a nuclease inactive RuvC domain and a nuclease active HNH domain. In some embodiments, the Cas nickase of a split prime editor comprises a nuclease inactive HNH domain and a nuclease active RuvC domain. In some embodiments, a split prime editor comprises a Cas9 nickase having an amino acid substitution in the RuvC domain. In some embodiments, the Cas9 nickase comprises a D10X amino acid substitution compared to a wild type S. pyogenes Cas9, wherein X is any amino acid other than D. In some embodiments, a split prime editor comprises a Cas9 nickase having an amino acid substitution in the HNH domain. In some embodiments, the Cas9 nickase comprises a H840X amino acid substitution compared to a wild type S. pyogenes Cas9, wherein X is any amino acid other than H.

[0239] In some embodiments, a split prime editor comprises a Cas protein that can bind to the target gene in a sequence-specific manner but lacks or has abolished nuclease activity and may not cleave either strand of a double stranded DNA in a target gene. Abolished activity or lacking activity can refer to an enzymatic activity less than 1%, less than 2%, less than 3%, less than 4%, less than 5%, less than 6%, less than 7%, less than 8%, less than 9%, or less than 10% activity compared to a wild-type exemplary activity (e.g., wild-type Cas9 nuclease activity). In some embodiments, a Cas protein of a split prime editor completely lacks nuclease activity. A nuclease, e.g., Cas9, that lacks nuclease activity may be referred to as nuclease inactive or “nuclease dead” (abbreviated by “d”). A nuclease dead Cas protein (e.g., dCas, dCas9) can bind to a target polynucleotide but may not cleave the target polynucleotide. In some aspects, a dead Cas protein is a dead Cas9 protein. In some embodiments, a split prime editor comprises a nuclease dead Cas protein wherein all of the nuclease domains (e.g., both RuvC and HNH nuclease domains in a Cas9 protein; RuvC nuclease domain in a Cpf1 protein) are mutated to lack catalytic activity, or are deleted.

[0240] A Cas protein can be modified. A Cas protein, e.g., Cas9, can be modified to increase or decrease nucleic acid binding affinity, nucleic acid binding specificity, and/or enzymatic activity. Cas proteins can also be modified to change any other activity or property of the protein, such as stability. For example, one or more nuclease domains of the Cas protein can be modified, deleted, or inactivated, or a Cas protein can be truncated to remove domains that are not essential for the function of the protein or to optimize (e.g., enhance or reduce) the activity of the Cas protein.

[0241] A Cas protein can be a fusion protein. For example, a Cas protein can be fused to a cleavage domain, an epigenetic modification domain, a transcriptional regulation domain, or a polymerase domain. A Cas protein can also be fused to a heterologous polypeptide providing increased or decreased stability. The fused domain or heterologous polypeptide can be located at the N-terminus, the C-terminus, or internally within the Cas protein.

[0242] In some embodiments, the Cas protein of a split prime editor is a Class 2 Cas protein. In some embodiments, the Cas protein is a type II Cas protein. In some embodiments, the Cas protein is a Cas9 protein, a modified version of a Cas9 protein, a Cas9 protein homolog, mutant, variant, or a functional fragment thereof. As used herein, a Cas9, Cas9 protein, Cas9 polypeptide or a Cas9 nuclease refers to an RNA guided nuclease comprising one or more Cas9 nuclease domains and a Cas9 gRNA binding domain having the ability to bind a guide polynucleotide, e.g., a PEgRNA. A Cas9 protein may refer to a wild type Cas9 protein from any organism or a homolog, ortholog, or paralog from any organisms; any functional mutants or functional variants thereof; or any functional fragments or domains thereof. In some embodiments, a split prime editor comprises a full-length Cas9 protein. In some embodiments, the Cas9 protein can generally comprises at least about 50%, 60%, 70%, 80%, 90%, 100% sequence identity to a wild type reference Cas9 protein (e.g., Cas9 from S. pyogenes). In some embodiments, the Cas9 comprises an amino acid change such as a deletion, insertion, substitution, fusion, chimera, or any combination thereof as compared to a wild type reference Cas9 protein.

[0243] In some embodiments, a Cas9 protein may comprise a Cas9 protein from Streptococcus pyogenes (Sp), Staphylococcus aureus (Sa), Streptococcus canis (Sc), Streptococcus thermophilus (St), Staphylococcus lugdunensis (Slu), Neisseria meningitidis (Nm), Campylobacter jejuni (Cj), Francisella novicida (Fn), or Treponema denticola (Td), or any Cas9 homolog or ortholog from an organism known in the art. In some embodiments, a Cas9 polypeptide is a SpCas9 polypeptide. In some embodiments, a Cas9 polypeptide is a SaCas9 polypeptide. In some embodiments, a Cas9 polypeptide is a ScCas9 polypeptide. In some embodiments, a Cas9 polypeptide is a StCas9 polypeptide. In some embodiments, a Cas9 polypeptide is a SluCas9 polypeptide. In some embodiments, a Cas9 polypeptide is a NmCas9 polypeptide. In some embodiments, a Cas9 polypeptide is a CjCas9 polypeptide. In some embodiments, a Cas9 polypeptide is a FnCas9 polypeptide. In some embodiments, a Cas9 polypeptide is a TdCas9 polypeptide. In some embodiments, a Cas9 polypeptide is a chimera comprising domains from two or more of the organisms described herein or those known in the art. In some embodiments, a Cas9 polypeptide is a Cas9 polypeptide from Streptococcus macacae. In some embodiments, a Cas9 polypeptide is a Cas9 polypeptide generated by replacing a PAM interaction domain of a SpCas9 with that of a Streptococcus macacae Cas9 (Spy-mac Cas9).

[0244] An exemplary Streptococcus pyogenes Cas9 (SpCas9) amino acid sequence is provided in SEQ ID NO: 4449.

[0245] Exemplary Streptococcus pyogenes Cas9 (SpCas9) amino acid sequence:

SEQ ID NO: 4449
[sequence omitted]

[0246] In some embodiments, a split prime editor comprises a Cas9 protein from Staphylococcus lugdunensis (Slu Cas9). An exemplary amino acid sequence of a Slu Cas9 is provided in SEQ ID NO: 4450.

[0247] Exemplary Staphylococcus lugdunensis Cas9 (Slu Cas9) amino acid sequence WP_002460848.1:

(SEQ ID NO: 4450)
MKRNYILGLDIGITSVGYGIIDYETRDVIDAGVRLFKEANVENNEGRRSKRGARRLKRRR
RHRIQRVKKLLFDYNLLTDHSELSGINPYEARVKGLSQKLSEEEFSAALLHLAKRRGVH
NVNEVEEDTGNELSTKEQISRNSKALEEKYVAELQLERLKKDGEVRGSINRFKTSDYVK
EAKQLLKVQKAYHQLDQSFIDTYIDLLETRRTYYEGPGEGSPFGWKDIKEWYEMLMGH
CTYFPEELRSVKYAYNADLYNALNDLNNLVITRDENEKLEYYEKFQIIENVFKQKKKPT
LKQIAKEILVNEEDIKGYRVTSTGKPEFTNLKVYHDIKDITARKEIIENAELLDQIAKILTIY
QSSEDIQEELTNLNSELTQEEIEQISNLKGYTGTHNLSLKAINLILDELWHTNDNQIAIFNR
LKLVPKKVDLSQQKEIPTTLVDDFILSPVVKRSFIQSIKVINAIIKKYGLPNDIIIELAREKN
SKDAQKMINEMQKRNRQTNERIEEIIRTTGKENAKYLIEKIKLHDMQEGKCLYSLEAIPL
EDLLNNPFNYEVDHIIPRSVSFDNSFNNKVLVKQEEASKKGNRTPFQYLSSSDSKISYETF
KKHILNLAKGKGRISKTKKEYLLEERDINRFSVQKDFINRNLVDTRYATRGLMNLLRSYF
RVNNLDVKVKSINGGFTSFLRRKWKFKKERNKGYKHHAEDALIIANADFIFKEWKKLD
KAKKVMENQMFEEKQAESMPEIETEQEYKEIFITPHQIKHIKDFKDYKYSHRVDKKPNR
ELINDTLYSTRKDDKGNTLIVNNLNGLYDKDNDKLKKLINKSPEKLLMYHHDPQTYQK
LKLIMEQYGDEKNPLYKYYEETGNYLTKYSKKDNGPVIKKIKYYGNKLNAHLDITDDY
PNSRNKVVKLSLKPYRFDVYLDNGVYKFVTVKNLDVIKKENYYEVNSKCYEEAKKLK
KISNQAEFIASFYNNDLIKINGELYRVIGVNNDLLNRIEVNMIDITYREYLENMNDKRPPR
IIKTIASKTQSIKKYSTDILGNLYEVKSKKHPQIIKK.

[0248] In some embodiments, a Cas9 protein comprises a variant Cas9 protein containing one or more amino acid substitutions. In some embodiments, a wildtype Cas9 protein comprises a RuvC domain and an HNH domain. In some embodiments, a split prime editor comprises a nuclease active Cas9 protein that may cleave both strands of a double stranded target DNA sequence. In some embodiments, the nuclease active Cas9 protein comprises a functional RuvC domain and a functional HNH domain. In some embodiments, a split prime editor comprises a Cas9 nickase that can bind to a guide polynucleotide and recognize a target DNA, but can cleave only one strand of a double stranded target DNA. In some embodiments, the Cas9 nickase comprises only one functional RuvC domain or one functional HNH domain. In some embodiments, a split prime editor comprises a Cas9 that has a non-functional HNH domain and a functional RuvC domain. In some embodiments, the split prime editor can cleave the edit strand (i.e., the PAM strand), but not the non-edit strand of a double stranded target DNA sequence. In some embodiments, a split prime editor comprises a Cas9 having a non-functional RuvC domain that can cleave the target strand (i.e., the non-PAM strand), but not the edit strand of a double stranded target DNA sequence. In some embodiments, a split prime editor comprises a Cas9 that has neither a functional RuvC domain nor a functional HNH domain, which may not cleave any strand of a double stranded target DNA sequence.

[0249] In some embodiments, a split prime editor comprises a Cas9 having a mutation in the RuvC domain that reduces or abolishes the nuclease activity of the RuvC domain. In some embodiments, the Cas9 comprise a mutation at amino acid D10 as compared to a wild type SpCas9 as set forth in SEQ ID NO: 4449, or a corresponding mutation thereof. In some embodiments, the Cas9 comprise a D10A mutation as compared to a wild type SpCas9 as set forth in SEQ ID NO: 4449, or a corresponding mutation thereof. In some embodiments, the Cas9 polypeptide comprise a mutation at amino acid D10, G12, and/or G17 as compared to a wild type SpCas9 as set forth in SEQ ID NO: 4449, or a corresponding mutation thereof. In some embodiments, the Cas9 polypeptide comprise a D10A mutation, a G12A mutation, and/or a G17A mutation as compared to a wild type SpCas9 as set forth in SEQ ID NO: 4449, or a corresponding mutation thereof.

[0250] In some embodiments, a split prime editor comprises a Cas9 polypeptide having a mutation in the HNH domain that reduces or abolishes the nuclease activity of the HNH domain. In some embodiments, the Cas9 polypeptide comprise a mutation at amino acid H840 as compared to a wild type SpCas9 as set forth in SEQ ID NO: 4449, or a corresponding mutation thereof. In some embodiments, the Cas9 polypeptide comprise a H840A mutation as compared to a wild type SpCas9 as set forth in SEQ ID NO: 4449, or a corresponding mutation thereof. In some embodiments, the Cas9 polypeptide comprise a mutation at amino acid E762, D839, H840, N854, N856, N863, H982, H983, A984, D986, and/or a A987 as compared to a wild type SpCas9 as set forth in SEQ ID NO: 4449, or a corresponding mutation thereof. In some embodiments, the Cas9 polypeptide comprise a E762A, D839A, H840A, N854A, N856A, N863A, H982A, H983A, A984A, and/or a D986A mutation as compared to a wild type SpCas9 as set forth in SEQ ID NO: 4449, or a corresponding mutation thereof.

[0251] In some embodiments, a split prime editor comprises a Cas9 having one or more amino acid substitutions in both the HNH domain and the RuvC domain that reduce or abolish the nuclease activity of both the HNH domain and the RuvC domain. In some embodiments, the split prime editor comprises a nuclease inactive Cas9, or a nuclease dead Cas9 (dCas9). In some embodiments, the dCas9 comprises a H840X substitution and a D10X mutation compared to a wild type SpCas9 as set forth in SEQ ID NO: 4449 or corresponding mutations thereof, wherein X is any amino acid other than H for the H840X substitution and any amino acid other than D for the D10X substitution. In some embodiments, the dead Cas9 comprises a H840A and a D10A mutation as compared to a wild type SpCas9 as set forth in SEQ ID NO: 4449, or corresponding mutations thereof.

[0252] In some embodiments, the N-terminal methionine is removed from a Cas9 nickase, or from any Cas9 variant, ortholog, or equivalent disclosed or contemplated herein. For example, methionine-minus Cas9 nickases include the following sequences, or a variant thereof having an amino acid sequence that has at least 80%, at least 85%, at least 90%, at least 95%, or at least 99% sequence identity thereto.

[0253] Besides dead Cas9 and Cas9 nickase variants, the Cas9 proteins used herein may also include other Cas9 variants having at least about 70% identical, at least about 80% identical, at least about 90% identical, at least about 95% identical, at least about 96% identical, at least about 97% identical, at least about 98% identical, at least about 99% identical, at least about 99.5% identical, or at least about 99.9% identical to any reference Cas9 protein, including any wild type Cas9, or mutant Cas9 (e.g., a dead Cas9 or Cas9 nickase), or fragment Cas9, or circular permutant Cas9, or other variant of Cas9 disclosed herein or known in the art. In some embodiments, a Cas9 variant may have 1, 2, 3, 4, 5, 6, 7, 8, 9, 10, 11, 12, 13, 14, 15, 16, 17, 18, 19, 20, 21, 22, 21, 24, 25, 26, 27, 28, 29, 30, 31, 32, 33, 34, 35, 36, 37, 38, 39, 40, 41, 42, 43, 44, 45, 46, 47, 48, 49, 50 or more amino acid changes compared to a reference Cas9, e.g., a wild type Cas9. In some embodiments, the Cas9 variant comprises a fragment of a reference Cas9 (e.g., a gRNA binding domain or a DNA-cleavage domain), such that the fragment is at least about 70% identical, at least about 80% identical, at least about 90% identical, at least about 95% identical, at least about 96% identical, at least about 97% identical, at least about 98% identical, at least about 99% identical, at least about 99.5% identical, or at least about 99.9% identical to the corresponding fragment of the reference Cas9, e.g., a wild type Cas9. In some embodiments, the fragment is at least 30%, at least 35%, at least 40%, at least 45%, at least 50%, at least 55%, at least 60%, at least 65%, at least 70%, at least 75%, at least 80%, at least 85%, at least 90%, at least 95% identical, at least 96%, at least 97%, at least 98%, at least 99%, or at least 99.5% of the amino acid length of a corresponding wild type Cas9.

[0254] In some embodiments, a Cas9 fragment is a functional fragment that retains one or more Cas9 activities. In some embodiments, the Cas9 fragment is at least 100 amino acids in length. In some embodiments, the fragment is at least 100, 150, 200, 250, 300, 350, 400, 450, 500, 550, 600, 650, 700, 750, 800, 850, 900, 950, 1000, 1050, 1100, 1150, 1200, 1250, or at least 1300 amino acids in length.

[0255] In some embodiments, a split prime editor comprises a Cas protein, e.g., Cas9, containing modifications that allow altered PAM recognition. In prime editing using a Cas-protein-based split prime editor, a “protospacer adjacent motif (PAM)”, PAM sequence, or PAM-like motif, may be used to refer to a short DNA sequence immediately following the protospacer sequence on the PAM strand of the target gene. In some embodiments, the PAM is recognized by the Cas nuclease in the split prime editor during prime editing. In certain embodiments, the PAM is required for target binding of the Cas protein. The specific PAM sequence required for Cas protein recognition may depend on the specific type of the Cas protein. A PAM can be 1, 2, 3, 4, 5, 6, 7, 8, 9, 10 or more nucleotides in length. In some embodiments, a PAM is between 2-6 nucleotides in length. In some embodiments, the PAM can be a 5′ PAM (i.e., located upstream of the 5′ end of the protospacer). In other embodiments, the PAM can be a 3′ PAM (i.e., located downstream of the 5′ end of the protospacer). In some embodiments, the Cas protein of a split prime editor recognizes a canonical PAM, for example, a SpCas9 recognizes 5′-NGG-3′ PAM. In some embodiments, the Cas protein of a split prime editor has altered or non-canonical PAM specificities. Exemplary PAM sequences and corresponding Cas variants are described in Table 1 below. It should be appreciated that for each of the variants provided, the Cas protein comprises one or more of the amino acid substitutions as indicated compared to a wild type Cas protein sequence, for example, the Cas9 as set forth in SEQ ID NO: 4449. The PAM motifs as shown in Table 1 below are in the order of 5′ to 3′.

TABLE 1
Cas protein variants and corresponding PAM sequences

| Variant | PAM |
|---|---|
| spCas9 (wild type) | NGG, NGA, NAG, |
| | NGNGA |
| spCas9- VRVRFRR R1335V, L1111R, D1135V, | NG |
| G1218R, E1219F, A1322R, T1337R | |
| spCas9-VQR (D1135V, R1335Q, T1337R) | NGA |
| spCas9-EQR (D1135E, R1335Q, T1337R) | NGA |
| spCas9-VRER (D1135V, G1218R, R1335E, T1337R) | NGCG |
| spCas9-VRQR (D1135V, G1218R, R1335Q, T1337R) | NGA |
| Cas9-NG (L1111R, D1135V, G1218R, E1219F, | NGN |
| A1322R, T1337R, R1335V) | |
| SpG Cas9 (D1135L, S1136W, G1218K, E1219Q, | NGN |
| R1335Q, T1337R) | |
| SyRY Cas9 | NRN |
| (A61R, L1111R, N1317R, A1322R, and R1333P) | |
| xCas9 (E480K, E543D, E1219V, K294R, Q1256K, | NGN |
| A262T, S409I, M694I) | |
| SluCa9 | NNGG |
| sRGN1, sRGN2, sRGN4, sRGN3.1, sRGN3.3 | NNGG |
| saCas9 | NNGRRT, NNGRRN |
| saCas9-KKH (E782K, N968K, R1015H) | NNNRRT |
| spCas9-MQKSER (D1135M, S1136Q, G1218K, E1219S, | NGCG/NGCN |
| R1335E, T1337R) | |
| spCas9-LRKIQK (D1135L, S1136R, G1218K, E1219I, | NGTN |
| R1335Q, T1337K) | |
| spCas9-LRVSQK (D1135L, S1136R, G1218V, E1219S, | NGTN |
| R1335Q, T1337K) | |
| spCas9-LRVSQL(D1135L, S1136R, G1218V, E1219S, | NGTN |
| R1335Q, T1337L) | |
| Cpf1 | TTTV |
| Spy-Mac | NAA |
| NmCas9 | NNNNGATT |
| StCas9 | NNAGAAW |
| TdCas9 | NAAAAC |

[0256] In some embodiments, a split prime editor comprises a Cas9 polypeptide comprising one or mutations selected from the group consisting of: A61R, L111R, D1135V, R221K, A262T, R324L, N394K, S4091, S4091, E427G, E480K, M495V, N497A, Y515N, K526E, F539S, E543D, R654L, R661A, R661L, R691A, N692A, M694A, M694I, Q695A, H698A, R753G, M763I, K848A, K890N, Q926A, K1003A, R1060A, L1111R, R1114G, D1135E, D1135L, D1135N, S1136W, V1139A, D1180G, G1218K, G1218R, G1218S, E1219Q, E1219V, E1219V, Q1221H, P1249S, E1253K, N1317R, A1320V, P1321S, A1322R, 11322V, D1332G, R1332N, A1332R, R1333K, R1333P, R1335L, R1335Q, R1335V, T1337N, T1337R, S1338T, H1349R, and any combinations thereof as compared to a wildtype SpCas9 polypeptide as set forth in SEQ ID NO: 4449.

[0257] In some embodiments, a split prime editor comprises a SaCas9 polypeptide. In some embodiments, the SaCas9 polypeptide comprises one or more of mutations E782K, N968K, and R1015H as compared to a wild type SaCas9. In some embodiments, a split prime editor comprises a FnCas9 polypeptide, for example, a wildtype FnCas9 polypeptide or a FnCas9 polypeptide comprising one or more of mutations E1369R, E1449H, or R1556A as compared to the wild type FnCas9. In some embodiments, a split prime editor comprises a Sc Cas9, for example, a wild type ScCas9 or a ScCas9 polypeptide comprises one or more of mutations I367K, G368D, I369K, H371L, T375S, T376G, and T1227K as compared to the wild type ScCas9. In some embodiments, a split prime editor comprises a St1 Cas9 polypeptide, a St3 Cas9 polypeptide, or a S1u Cas9 polypeptide.

[0258] In some embodiments, a split prime editor comprises a Cas polypeptide that comprises a circular permutant Cas variant. For example, a Cas9 polypeptide of a split prime editor may be engineered such that the N-terminus and the C-terminus of a Cas9 protein (e.g., a wild type Cas9 protein, or a Cas9 nickase) are topically rearranged to retain the ability to bind DNA when complexed with a guide RNA (gRNA). An exemplary circular permutant configuration may be N-terminus-[original C-terminus]-[original N-terminus]-C-terminus. Any of the Cas9 proteins described herein, including any variant, ortholog, or naturally occurring Cas9 or equivalent thereof, may be reconfigured as a circular permutant variant.

[0259] In various embodiments, the circular permutants of a Cas protein, e.g., a Cas9, may have the following structure: N-terminus-[original C-terminus]-[optional linker]-[original N-terminus]-C-terminus. In some embodiments, a circular permutant Cas9 comprises any one of the following structures:
[0260] N-terminus-[1268-1368]-[optional linker]-[1-1267]-C-terminus;
[0261] N-terminus-[1168-1368]-[optional linker]-[1-1167]-C-terminus;
[0262] N-terminus-[1068-1368]-[optional linker]-[1-1067]-C-terminus;
[0263] N-terminus-[968-1368]-[optional linker]-[1-967]-C-terminus;
[0264] N-terminus-[868-1368]-[optional linker]-[1-867]-C-terminus;
[0265] N-terminus-[768-1368]-[optional linker]-[1-767]-C-terminus;
[0266] N-terminus-[668-1368]-[optional linker]-[1-667]-C-terminus;
[0267] N-terminus-[568-1368]-[optional linker]-[1-567]-C-terminus;
[0268] N-terminus-[468-1368]-[optional linker]-[1-467]-C-terminus;
[0269] N-terminus-[368-1368]-[optional linker]-[1-367]-C-terminus;
[0270] N-terminus-[268-1368]-[optional linker]-[1-267]-C-terminus;
[0271] N-terminus-[168-1368]-[optional linker]-[1-167]-C-terminus;
[0272] N-terminus-[68-1368]-[optional linker]-[1-67]-C-terminus;
[0273] N-terminus-[10-1368]-[optional linker]-[1-9]-C-terminus, or the corresponding circular permutants of other Cas9 proteins (including other Cas9 orthologs, variants, etc.).

[0274] In some embodiments, a circular permutant Cas9 comprises any one of the following structures (amino acid positions as set forth in SEQ ID NO: 4449-1368 amino acids of UniProtKB—Q99ZW2:
[0275] N-terminus-[102-1368]-[optional linker]-[1-101]-C-terminus;
[0276] N-terminus-[1028-1368]-[optional linker]-[1-1027]-C-terminus;
[0277] N-terminus-[1041-1368]-[optional linker]-[1-1043]-C-terminus;
[0278] N-terminus-[1249-1368]-[optional linker]-[1-1248]-C-terminus; or
[0279] N-terminus-[1300-1368]-[optional linker]-[1-1299]-C-terminus, or the corresponding circular permutants of other Cas9 proteins (including other Cas9 orthologs, variants, etc).

[0280] In some embodiments, a circular permutant Cas9 comprises any one of the following structures (amino acid positions as set forth in SEQ ID NO: 4449-1368 amino acids of UniProtKB—Q99ZW2 N-terminus-[103-1368]-[optional linker]-[1-102]-C-terminus:
[0281] N-terminus-[1029-1368]-[optional linker]-[1-1028]-C-terminus;
[0282] N-terminus-[1042-1368]-[optional linker]-[1-1041]-C-terminus;
[0283] N-terminus-[1250-1368]-[optional linker]-[1-1249]-C-terminus; or
[0284] N-terminus-[1301-1368]-[optional linker]-[1-1300]-C-terminus, or the corresponding circular permutants of other Cas9 proteins (including other Cas9 orthologs, variants, etc).

[0285] In some embodiments, the circular permutant can be formed by linking a C-terminal fragment of a Cas9 to an N-terminal fragment of a Cas9, either directly or by using a linker, such as an amino acid linker. In some embodiments, The C-terminal fragment may correspond to the 95% or more of the C-terminal amino acids of a Cas9 (e.g., amino acids about 1300-1368 as set forth in SEQ ID No: 4449 or corresponding amino acid positions thereof), or the 90%, 85%, 80%, 75%, 70%, 65%, 60%, 55%, 50%, 45%, 40%, 35%, 30%, 25%, 20%, 15%, 10%, or 5% or more of the C-terminal amino acids of a Cas9 (e.g., SEQ ID No: 4449). The N-terminal portion may correspond to 95% or more of the N-terminal amino acids of a Cas9 (e.g., amino acids about 1-1300 as set forth in SEQ ID No: 4449 or corresponding amino acid positions thereof), or 90%, 85%, 80%, 75%, 70%, 65%, 60%, 55%, 50%, 45%, 40%, 35%, 30%, 25%, 20%, 15%, 10%, or 5% or more of the N terminal amino acids of a Cas9 (e.g., as set forth in SEQ ID No: 4449 or corresponding amino acid positions thereof).

[0286] In some embodiments, the circular permutant can be formed by linking a C-terminal fragment of a Cas9 to an N-terminal fragment of a Cas9, either directly or by using a linker, such as an amino acid linker. In some embodiments, the C-terminal fragment that is rearranged to the N-terminus includes or corresponds to the C-terminal 30% or less of the amino acids of a Cas9 (e.g., amino acids 1012-1368 as set forth in SEQ ID No: 4449 or corresponding amino acid positions thereof). In some embodiments, the C-terminal fragment that is rearranged to the N-terminus, includes or corresponds to the C-terminal 30%, 29%, 28%, 27%, 26%, 25%, 24%, 23%, 22%, 21%, 20%, 19%, 18%, 17%, 16%, 15%, 14%, 13%, 12%, 11%, 10%, 9%, 8%, 7%, 6%, 5%, 4%, 3%, 2%, or 1% of the amino acids of a Cas9 (e.g., as set forth in SEQ ID No: 4449 or corresponding amino acid positions thereof). In some embodiments, the C-terminal fragment that is rearranged to the N-terminus, includes or corresponds to the C-terminal 410 residues or less of a Cas9 (e.g., as set forth in SEQ ID No: 4449 or corresponding amino acid positions thereof). In some embodiments, the C-terminal portion that is rearranged to the N-terminus, includes or corresponds to the C-terminal 410, 400, 390, 380, 370, 360, 350, 340, 330, 320, 310, 300, 290, 280, 270, 260, 250, 240, 230, 220, 210, 200, 190, 180, 170, 160, 150, 140, 130, 120, 110, 100, 90, 80, 70, 60, 50, 40, 30, 20, or 10 residues of a Cas9 (c/g/as set forth in SEQ ID No: 4449 or corresponding amino acid positions thereof). In some embodiments, the C-terminal portion that is rearranged to the N-terminus includes or corresponds to the C-terminal 357, 341, 328, 120, or 69 residues of a Cas9 (e.g., as set forth in SEQ ID No: 4449 or corresponding amino acid positions thereof).

[0287] In other embodiments, circular permutant Cas9 variants may be a topological rearrangement of a Cas9 primary structure based on the following method, which is based on S. pyogenes Cas9 of SEQ ID NO: 4449: (a) selecting a circular permutant (CP) site corresponding to an internal amino acid residue of the Cas9 primary structure, which dissects the original protein into two halves: an N-terminal region and a C-terminal region; (b) modifying the Cas9 protein sequence (e.g., by genetic engineering techniques) by moving the original C-terminal region (comprising the CP site amino acid) to precede the original N-terminal region, thereby forming a new N-terminus of the Cas9 protein that now begins with the CP site amino acid residue. The CP site can be located in any domain of the Cas9 protein, including, for example, the helical-II domain, the RuvCIII domain, or the CTD domain. For example, the CP site may be located (as set forth in SEQ ID No: 4449 or corresponding amino acid positions thereof) at original amino acid residue 181, 199, 230, 270, 310, 1010, 1016, 1023, 1029, 1041, 1247, 1249, or 1282. Thus, once relocated to the N-terminus, original amino acid 181, 199, 230, 270, 310, 1010, 1016, 1023, 1029, 1041, 1247, 1249, or 1282 would become the new N-terminal amino acid. Nomenclature of these CP-Cas9 proteins may be referred to as Cas9-CP¹⁸¹, Cas9-CP¹⁹⁹, Cas9-CP²³⁰, Cas9-CP²⁷⁰, Cas9-CP³¹⁰, Cas9-CP¹⁰¹⁰, Cas9-CP¹⁰¹⁶, Cas9-CP¹⁰²³, Cas9-CP¹⁰²⁹, Cas9-CP¹⁰⁴¹, Cas9-CP¹²⁴⁷, Cas9-CP¹²⁴⁹, and Cas9-CP¹²⁸², respectively. This description is not meant to be limited to making CP variants from SEQ ID NO: 18, but may be implemented to make CP variants in any Cas9 sequence, either at CP sites that correspond to these positions, or at other CP sites entirely. This description is not meant to limit the specific CP sites in any way. Virtually any CP site may be used to form a CP-Cas9 variant.

[0288] In some embodiments, a split prime editor comprises a Cas9 functional variant that is of smaller molecular weight than a wild type SpCas9 protein. In some embodiments, a smaller-sized Cas9 functional variant may facilitate delivery to cells, e.g., by an expression vector, nanoparticle, or other means of delivery. In certain embodiments, a smaller-sized Cas9 functional variant is a Class 2 Type II Cas protein. In certain embodiments, a smaller-sized Cas9 functional variant is a Class 2 Type V Cas protein. In certain embodiments, a smaller-sized Cas9 functional variant is a Class 2 Type VI Cas protein.

[0289] In some embodiments, a split prime editor comprises a SpCas9 that is 1368 amino acids in length and has a predicted molecular weight of 158 kilodaltons. In some embodiments, a split prime editor comprises a Cas9 functional variant or functional fragment that is less than 1300 amino acids, less than 1290 amino acids, than less than 1280 amino acids, less than 1270 amino acids, less than 1260 amino acid, less than 1250 amino acids, less than 1240 amino acids, less than 1230 amino acids, less than 1220 amino acids, less than 1210 amino acids, less than 1200 amino acids, less than 1190 amino acids, less than 1180 amino acids, less than 1170 amino acids, less than 1160 amino acids, less than 1150 amino acids, less than 1140 amino acids, less than 1130 amino acids, less than 1120 amino acids, less than 1110 amino acids, less than 1100 amino acids, less than 1050 amino acids, less than 1000 amino acids, less than 950 amino acids, less than 900 amino acids, less than 850 amino acids, less than 800 amino acids, less than 750 amino acids, less than 700 amino acids, less than 650 amino acids, less than 600 amino acids, less than 550 amino acids, or less than 500 amino acids, but at least larger than about 400 amino acids and retaining the one or more functions, e.g., DNA binding function, of the Cas9 protein.

[0290] In some embodiments, the Cas protein may include any CRISPR associated protein, including but not limited to, Cas12a, Cas12b1, Cas1, Cas1B, Cas2, Cas3, Cas4, Cas5, Cas6, Cas7, Cas8, Cas9 (also known as Csn1 and Csx12), Cas10, Csy1, Csy2, Csy3, Cse1, Cse2, Csc1, Csc2, Csa5, Csn2, Csm2, Csm3, Csm4, Csm5, Csm6, Cmr1, Cmr3, Cmr4, Cmr5, Cmr6, Csb1, Csb2, Csb3, Csx17, Csx14, Csx10, Csx16, CsaX, Csx3, Csx1, Csx15, Csf1, Csf2, Csf3, Csf4, homologs thereof, or modified versions thereof, and preferably comprising a nickase mutation (e.g., a mutation corresponding to the D10A mutation of the wild type Cas9 polypeptide of SEQ ID NO: 18). In various other embodiments, the napDNAbp can be any of the following proteins: a Cas9, a Cas12a (Cpf1), a Cas12e (CasX), a Cas12d (CasY), a Cas12b1 (C2c1), a Cas13a (C2c2), a Cas12c (C2c3), a GeoCas9, a CjCas9, a Cas12g, a Cas12h, a Cas12i, a Cas13b, a Cas13c, a Cas13d, a Cas14, a Csn2, an xCas9, an SpCas9-NG, a circularly permuted Cas9, or an Argonaute (Ago) domain, or a functional variant or fragment thereof.

TABLE 2
Exemplary Cas proteins

| | |
|---|---|
| Legacy nomenclature | Current nomenclature |

type II CRISPR-Cas enzymes

| | |
|---|---|
| Cas9 | same |

type V CRISPR-Cas enzymes

| | |
|---|---|
| Cpf1 | Cas12a |
| CasX | Cas12e |
| C2c1 | Cas12b1 |
| Cas12b2 | same |
| C2c3 | Cas12c |
| CasY | Cas12d |
| C2c4 | same |
| C2c8 | same |
| C2c5 | same |
| C2c10 | same |
| C2c9 | same |

type VI CRISPR-Cas enzymes

| | |
|---|---|
| C2c2 | Cas13a |
| Cas13d | same |
| C2c7 | Cas13c |
| C2c6 | Cas13b |

[0291] In some embodiments, a split prime editor as described herein may comprise a Cas12a (Cpf1) polypeptide or functional variants thereof. In some embodiments, the Cas 12a polypeptide comprises a mutation that reduces or abolishes the endonuclease domain of the Cas12a polypeptide. In some embodiments, the Cas12a polypeptide is a Cas12a nickase. In some embodiments, the Cas protein comprises an amino acid sequence that comprises at least about 50%, 60%, 70%, 80%, 90%, 91%, 92%, 93%, 94%, 95%, 96%, 97%, 98%, 99%, or 100% sequence identity to a naturally occurring Cas 12a polypeptide.

[0292] In some embodiments, a split prime editor comprises a Cas protein that is a Cas12b (C2c1) or a Cas12c (C2c3) polypeptide. In some embodiments, the Cas protein comprises an amino acid sequence that comprises at least about 50%, 60%, 70%, 80%, 90%, 91%, 92%, 93%, 94%, 95%, 96%, 97%, 98%, 99%, or 100% sequence identity to a naturally occurring Cas12b (C2c1) or Cas12c (C2c3) protein. In some embodiments, the Cas protein is a Cas12b nickase or a Cas12c nickase. In some embodiments, the Cas protein is a Cas 12e, a Cas12d, a Cas13, Cas14a, Cas14b, Cas14c, Cas14d, Cas14e, Cas14f, Cas14g, Cas14h, Cas14u, or a Cas Φ polypeptide. In some embodiments, the Cas protein comprises an amino acid sequence that comprises at least about 50%, 60%, 70%, 80%, 90%, 91%, 92%, 93%, 94%, 95%, 96%, 97%, 98%, 99%, or 100% sequence identity to a naturally-occurring Cas12e, Cas12d, Cas13, Cas14a, Cas14b, Cas14c, Cas14d, Cas14e, Cas14f, Cas14g, Cas14h, Cas14u, or Cas Φ protein. In some embodiments, the Cas protein is a Cas12e, Cas12d, Cas13, or Cas @ nickase.

[0293] In some embodiments, the Cas protein comprises any one of the Cas9 amino acid sequences as set forth in Table 14. In some embodiments, the Cas protein comprises a Cas12 amino acid sequence as set forth in Table 14.

[0294] In some embodiments, the DNA binding domain comprises any one of the sequences set forth in Table 14.

TABLE 14
Exemplary DNA-binding domain nuclease and nickase sequences;
for each DNA binding domain nuclease, sequences of an
active nuclease and a nickase are provided

| SEQ | | | SEQ | | | WT | |
|---|---|---|---|---|---|---|---|
| ID | Nuclease | Nickase | ID | Nickase | | Uniprot/ | |
| NO: | sequence | Mutation | NO: | Sequence | Name | NCBI | PAM |
| 8678 | DKKYSIGLDIGTNS | H840A | 8000 | DKKYSIGLDIGT | SpCas9 | Q99ZW2-1 | NGG |
| | VGWAVITDEYKVP | | | NSVGWAVITDE | | | |
| | SKKFKVLGNTDRH | | | YKVPSKKFKVL | | | |
| | SIKKNLIGALLFDSG | | | GNTDRHSIKKNL | | | |
| | ETAEATRLKRTARR | | | IGALLFDSGETA | | | |
| | RYTRRKNRICYLQE | | | EATRLKRTARR | | | |
| | IFSNEMAKVDDSFF | | | RYTRRKNRICYL | | | |
| | HRLEESFLVEEDKK | | | QEIFSNEMAKVD | | | |
| | HERHPIFGNIVDEV | | | DSFFHRLEESFL | | | |
| | AYHEKYPTIYHLRK | | | VEEDKKHERHPI | | | |
| | KLVDSTDKADLRLI | | | FGNIVDEVAYHE | | | |
| | YLALAHMIKFRGH | | | KYPTIYHLRKKL | | | |
| | FLIEGDLNPDNSDV | | | VDSTDKADLRLI | | | |
| | DKLFIQLVQTYNQL | | | YLALAHMIKFR | | | |
| | FEENPINASGVDAK | | | GHFLIEGDLNPD | | | |
| | AILSARLSKSRRLE | | | NSDVDKLFIQLV | | | |
| | NLIAQLPGEKKNGL | | | QTYNQLFEENPI | | | |
| | FGNLIALSLGLTPNF | | | NASGVDAKAILS | | | |
| | KSNFDLAEDAKLQ | | | ARLSKSRRLENL | | | |
| | LSKDTYDDDLDNL | | | IAQLPGEKKNGL | | | |
| | LAQIGDQYADLFLA | | | FGNLIALSLGLT | | | |
| | AKNLSDAILLSDILR | | | PNFKSNFDLAED | | | |
| | VNTEITKAPLSASM | | | AKLQLSKDTYD | | | |
| | IKRYDEHHQDLTLL | | | DDLDNLLAQIG | | | |
| | KALVRQQLPEKYK | | | DQYADLFLAAK | | | |
| | EIFFDQSKNGYAGY | | | NLSDAILLSDILR | | | |
| | IDGGASQEEFYKFI | | | VNTEITKAPLSA | | | |
| | KPILEKMDGTEELL | | | SMIKRYDEHHQ | | | |
| | VKLNREDLLRKQR | | | DLTLLKALVRQ | | | |
| | TFDNGSIPHQIHLGE | | | QLPEKYKEIFFD | | | |
| | LHAILRRQEDFYPF | | | QSKNGYAGYID | | | |
| | LKDNREKIEKILTFR | | | GGASQEEFYKFI | | | |
| | IPYYVGPLARGNSR | | | KPILEKMDGTEE | | | |
| | FAWMTRKSEETITP | | | LLVKLNREDLLR | | | |
| | WNFEEVVDKGASA | | | KQRTFDNGSIPH | | | |
| | QSFIERMTNFDKNL | | | QIHLGELHAILR | | | |
| | PNEKVLPKHSLLYE | | | RQEDFYPFLKDN | | | |
| | YFTVYNELTKVKY | | | REKIEKILTFRIP | | | |
| | VTEGMRKPAFLSG | | | YYVGPLARGNS | | | |
| | EQKKAIVDLLFKTN | | | RFAWMTRKSEE | | | |
| | RKVTVKQLKEDYF | | | TITPWNFEEVVD | | | |
| | KKIECFDSVEISGVE | | | KGASAQSFIERM | | | |
| | DRFNASLGTYHDL | | | TNFDKNLPNEK | | | |
| | LKIIKDKDFLDNEE | | | VLPKHSLLYEYF | | | |
| | NEDILEDIVLTLTLF | | | TVYNELTKVKY | | | |
| | EDREMIEERLKTYA | | | VTEGMRKPAFL | | | |
| | HLFDDKVMKQLKR | | | SGEQKKAIVDLL | | | |
| | RRYTGWGRLSRKLI | | | FKTNRKVTVKQ | | | |
| | NGIRDKQSGKTILD | | | LKEDYFKKIECF | | | |
| | FLKSDGFANRNFM | | | DSVEISGVEDRF | | | |
| | QLIHDDSLTFKEDI | | | NASLGTYHDLL | | | |
| | QKAQVSGQGDSLH | | | KIIKDKDFLDNE | | | |
| | EHIANLAGSPAIKK | | | ENEDILEDIVLTL | | | |
| | GILQTVKVVDELV | | | TLFEDREMIEER | | | |
| | KVMGRHKPENIVIE | | | LKTYAHLFDDK | | | |
| | MARENQTTQKGQK | | | VMKQLKRRRYT | | | |
| | NSRERMKRIEEGIK | | | GWGRLSRKLIN | | | |
| | ELGSQILKEHPVEN | | | GIRDKQSGKTIL | | | |
| | TQLQNEKLYLYYL | | | DFLKSDGFANR | | | |
| | QNGRDMYVDQEL | | | NFMQLIHDDSLT | | | |
| | DINRLSDYDVDHIV | | | FKEDIQKAQVSG | | | |
| | PQSFLKDDSIDNKV | | | QGDSLHEHIANL | | | |
| | LTRSDKNRGKSDN | | | AGSPAIKKGILQ | | | |
| | VPSEEVVKKMKNY | | | TVKVVDELVKV | | | |
| | WRQLLNAKLITQR | | | MGRHKPENIVIE | | | |
| | KFDNLTKAERGGL | | | MARENQTTQKG | | | |
| | SELDKAGFIKRQLV | | | QKNSRERMKRIE | | | |
| | ETRQITKHVAQILD | | | EGIKELGSQILKE | | | |
| | SRMNTKYDENDKL | | | HPVENTQLQNE | | | |
| | IREVKVITLKSKLVS | | | KLYLYYLQNGR | | | |
| | DFRKDFQFYKVREI | | | DMYVDQELDIN | | | |
| | NNYHHAHDAYLN | | | RLSDYDVDAIVP | | | |
| | AVVGTALIKKYPKL | | | QSFLKDDSIDNK | | | |
| | ESEFVYGDYKVYD | | | VLTRSDKNRGK | | | |
| | VRKMIAKSEQEIGK | | | SDNVPSEEVVK | | | |
| | ATAKYFFYSNIMNF | | | KMKNYWRQLL | | | |
| | FKTEITLANGEIRKR | | | NAKLITQRKFDN | | | |
| | PLIETNGETGEIVW | | | LTKAERGGLSEL | | | |
| | DKGRDFATVRKVL | | | DKAGFIKRQLVE | | | |
| | SMPQVNIVKKTEV | | | TRQITKHVAQIL | | | |
| | QTGGFSKESILPKR | | | DSRMNTKYDEN | | | |
| | NSDKLIARKKDWD | | | DKLIREVKVITL | | | |
| | PKKYGGFDSPTVA | | | KSKLVSDFRKDF | | | |
| | YSVLVVAKVEKGK | | | QFYKVREINNY | | | |
| | SKKLKSVKELLGITI | | | HHAHDAYLNAV | | | |
| | MERSSFEKNPIDFL | | | VGTALIKKYPKL | | | |
| | EAKGYKEVKKDLII | | | ESEFVYGDYKV | | | |
| | KLPKYSLFELENGR | | | YDVRKMIAKSE | | | |
| | KRMLASAGELQKG | | | QEIGKATAKYFF | | | |
| | NELALPSKYVNFLY | | | YSNIMNFFKTEI | | | |
| | LASHYEKLKGSPED | | | TLANGEIRKRPLI | | | |
| | NEQKQLFVEQHKH | | | ETNGETGEIVW | | | |
| | YLDEIIEQISEFSKR | | | DKGRDFATVRK | | | |
| | VILADANLDKVLSA | | | VLSMPQVNIVK | | | |
| | YNKHRDKPIREQAE | | | KTEVQTGGFSKE | | | |
| | NIIHLFTLTNLGAPA | | | SILPKRNSDKLIA | | | |
| | AFKYFDTTIDRKRY | | | RKKDWDPKKY | | | |
| | TSTKEVLDATLIHQ | | | GGFDSPTVAYSV | | | |
| | SITGLYETRIDLSQL | | | LVVAKVEKGKS | | | |
| | GGD | | | KKLKSVKELLGI | | | |
| | | | | TIMERSSFEKNPI | | | |
| | | | | DFLEAKGYKEV | | | |
| | | | | KKDLIIKLPKYS | | | |
| | | | | LFELENGRKRM | | | |
| | | | | LASAGELQKGN | | | |
| | | | | ELALPSKYVNFL | | | |
| | | | | YLASHYEKLKG | | | |
| | | | | SPEDNEQKQLFV | | | |
| | | | | EQHKHYLDEIIE | | | |
| | | | | QISEFSKRVILAD | | | |
| | | | | ANLDKVLSAYN | | | |
| | | | | KHRDKPIREQAE | | | |
| | | | | NIIHLFTLTNLGA | | | |
| | | | | PAAFKYFDTTID | | | |
| | | | | RKRYTSTKEVL | | | |
| | | | | DATLIHQSITGL | | | |
| | | | | YETRIDLSQLGG | | | |
| | | | | D | | | |
| 8679 | NQKFILGLDIGITSV | N582A | 8688 | NQKFILGLDIGIT | sluCas9 | WP_002460848 | NNGG |
| | GYGLIDYETKNIID | | | SVGYGLIDYETK | | | |
| | AGVRLFPEANVEN | | | NIIDAGVRLFPE | | | |
| | NEGRRSKRGSRRL | | | ANVENNEGRRS | | | |
| | KRRRIHRLERVKKL | | | KRGSRRLKRRRI | | | |
| | LEDYNLLDQSQIPQ | | | HRLERVKKLLE | | | |
| | STNPYAIRVKGLSE | | | DYNLLDQSQIPQ | | | |
| | ALSKDELVIALLHI | | | STNPYAIRVKGL | | | |
| | AKRRGIHKIDVIDS | | | SEALSKDELVIA | | | |
| | NDDVGNELSTKEQ | | | LLHIAKRRGIHKI | | | |
| | LNKNSKLLKDKFV | | | DVIDSNDDVGN | | | |
| | CQIQLERMNEGQV | | | ELSTKEQLNKNS | | | |
| | RGEKNRFKTADIIK | | | KLLKDKFVCQIQ | | | |
| | EIIQLLNVQKNFHQ | | | LERMNEGQVRG | | | |
| | LDENFINKYIELVE | | | EKNRFKTADIIK | | | |
| | MRREYFEGPGKGS | | | EIIQLLNVQKNF | | | |
| | PYGWEGDPKAWY | | | HQLDENFINKYI | | | |
| | ETLMGHCTYFPDEL | | | ELVEMRREYFE | | | |
| | RSVKYAYSADLEN | | | GPGKGSPYGWE | | | |
| | ALNDLNNLVIQRD | | | GDPKAWYETLM | | | |
| | GLSKLEYHEKYHII | | | GHCTYFPDELRS | | | |
| | ENVFKQKKKPTLK | | | VKYAYSADLEN | | | |
| | QIANEINVNPEDIK | | | ALNDLNNLVIQR | | | |
| | GYRITKSGKPQFTE | | | DGLSKLEYHEK | | | |
| | FKLYHDLKSVLFD | | | YHIIENVFKQKK | | | |
| | QSILENEDVLDQIA | | | KPTLKQIANEIN | | | |
| | EILTIYQDKDSIKSK | | | VNPEDIKGYRIT | | | |
| | LTELDILLNEEDKE | | | KSGKPQFTEFKL | | | |
| | NIAQLTGYTGTHRL | | | YHDLKSVLFDQ | | | |
| | SLKCIRLVLEEQWY | | | SILENEDVLDQI | | | |
| | SSRNQMEIFTHLNI | | | AEILTIYQDKDSI | | | |
| | KPKKINLTAANKIP | | | KSKLTELDILLN | | | |
| | KAMIDEFILSPVVK | | | EEDKENIAQLTG | | | |
| | RTFGQAINLINKIIE | | | YTGTHRLSLKCI | | | |
| | KYGVPEDIIIELARE | | | RLVLEEQWYSS | | | |
| | NNSKDKQKFINEM | | | RNQMEIFTHLNI | | | |
| | QKKNENTRKRINEII | | | KPKKINLTAANK | | | |
| | GKYGNQNAKRLVE | | | IPKAMIDEFILSP | | | |
| | KIRLHDEQEGKCLY | | | VVKRTFGQAINL | | | |
| | SLESIPLEDLLNNPN | | | INKIIEKYGVPED | | | |
| | HYEVDHIIPRSVSFD | | | IIIELARENNSKD | | | |
| | NSYHNKVLVKQSE | | | KQKFINEMQKK | | | |
| | NSKKSNLTPYQYFN | | | NENTRKRINEIIG | | | |
| | SGKSKLSYNQFKQ | | | KYGNQNAKRLV | | | |
| | HILNLSKSQDRISK | | | EKIRLHDEQEGK | | | |
| | KKKEYLLEERDINK | | | CLYSLESIPLEDL | | | |
| | FEVQKEFINRNLVD | | | LNNPNHYEVDHI | | | |
| | TRYATRELTNYLK | | | IPRSVSFDNSYH | | | |
| | AYFSANNMNVKVK | | | NKVLVKQSEAS | | | |
| | TINGSFTDYLRKVW | | | KKSNLTPYQYF | | | |
| | KFKKERNHGYKHH | | | NSGKSKLSYNQF | | | |
| | AEDALIIANADFLF | | | KQHILNLSKSQD | | | |
| | KENKKLKAVNSVL | | | RISKKKKEYLLE | | | |
| | EKPEIESKQLDIQV | | | ERDINKFEVQKE | | | |
| | DSEDNYSEMFIIPK | | | FINRNLVDTRYA | | | |
| | QVQDIKDFRNFKYS | | | TRELTNYLKAYF | | | |
| | HRVDKKPNRQLIN | | | SANNMNVKVKT | | | |
| | DTLYSTRKKDNST | | | INGSFTDYLRKV | | | |
| | YIVQTIKDIYAKDN | | | WKFKKERNHGY | | | |
| | TTLKKQFDKSPEKF | | | KHHAEDALIIAN | | | |
| | LMYQHDPRTFEKL | | | ADFLFKENKKL | | | |
| | EVIMKQYANEKNP | | | KAVNSVLEKPEI | | | |
| | LAKYHEETGEYLT | | | ESKQLDIQVDSE | | | |
| | KYSKKNNGPIVKSL | | | DNYSEMFIIPKQ | | | |
| | KYIGNKLGSHLDVT | | | VQDIKDFRNFKY | | | |
| | HQFKSSTKKLVKLS | | | SHRVDKKPNRQ | | | |
| | IKPYRFDVYLTDKG | | | LINDTLYSTRKK | | | |
| | YKFITISYLDVLKK | | | DNSTYIVQTIKDI | | | |
| | DNYYYIPEQKYDK | | | YAKDNTTLKKQ | | | |
| | LKLGKAIDKNAKFI | | | FDKSPEKFLMY | | | |
| | ASFYKNDLIKLDGE | | | QHDPRTFEKLEV | | | |
| | IYKIIGVNSDTRNMI | | | IMKQYANEKNP | | | |
| | ELDLPDIRYKEYCE | | | LAKYHEETGEY | | | |
| | LNNIKGEPRIKKTIG | | | LTKYSKKNNGPI | | | |
| | KKVNSIEKLTTDVL | | | VKSLKYIGNKLG | | | |
| | GNVFTNTQYTKPQ | | | SHLDVTHQFKSS | | | |
| | LLFKRGN | | | TKKLVKLSIKPY | | | |
| | | | | RFDVYLTDKGY | | | |
| | | | | KFITISYLDVLK | | | |
| | | | | KDNYYYIPEQK | | | |
| | | | | YDKLKLGKAID | | | |
| | | | | KNAKFIASFYKN | | | |
| | | | | DLIKLDGEIYKII | | | |
| | | | | GVNSDTRNMIEL | | | |
| | | | | DLPDIRYKEYCE | | | |
| | | | | LNNIKGEPRIKK | | | |
| | | | | TIGKKVNSIEKL | | | |
| | | | | TTDVLGNVFTN | | | |
| | | | | TQYTKPQLLFKR | | | |
| | | | | GN | | | |
| 8680 | KRNYILGLDIGITSV | N580A | 8689 | KRNYILGLDIGIT | saCas9 | J7RUA5 | NNGRRT |
| | GYGIIDYETRDVID | | | SVGYGIIDYETR | | | |
| | AGVRLFKEANVEN | | | DVIDAGVRLFKE | | | |
| | NEGRRSKRGARRL | | | ANVENNEGRRS | | | |
| | KRRRRHRIQRVKK | | | KRGARRLKRRR | | | |
| | LLFDYNLLTDHSEL | | | RHRIQRVKKLLF | | | |
| | SGINPYEARVKGLS | | | DYNLLTDHSELS | | | |
| | QKLSEEEFSAALLH | | | GINPYEARVKGL | | | |
| | LAKRRGVHNVNEV | | | SQKLSEEEFSAA | | | |
| | EEDTGNELSTKEQI | | | LLHLAKRRGVH | | | |
| | SRNSKALEEKYVA | | | NVNEVEEDTGN | | | |
| | ELQLERLKKDGEV | | | ELSTKEQISRNS | | | |
| | RGSINRFKTSDYVK | | | KALEEKYVAEL | | | |
| | EAKQLLKVQKAYH | | | QLERLKKDGEV | | | |
| | QLDQSFIDTYIDLLE | | | RGSINRFKTSDY | | | |
| | TRRTYYEGPGEGSP | | | VKEAKQLLKVQ | | | |
| | FGWKDIKEWYEML | | | KAYHQLDQSFID | | | |
| | MGHCTYFPEELRSV | | | TYIDLLETRRTY | | | |
| | KYAYNADLYNALN | | | YEGPGEGSPFG | | | |
| | DLNNLVITRDENEK | | | WKDIKEWYEML | | | |
| | LEYYEKFQIIENVF | | | MGHCTYFPEEL | | | |
| | KQKKKPTLKQIAKE | | | RSVKYAYNADL | | | |
| | ILVNEEDIKGYRVT | | | YNALNDLNNLV | | | |
| | STGKPEFTNLKVYH | | | ITRDENEKLEYY | | | |
| | DIKDITARKEIIENA | | | EKFQIIENVFKQ | | | |
| | ELLDQIAKILTIYQS | | | KKKPTLKQIAKE | | | |
| | SEDIQEELTNLNSEL | | | ILVNEEDIKGYR | | | |
| | TQEEIEQISNLKGYT | | | VTSTGKPEFTNL | | | |
| | GTHNLSLKAINLIL | | | KVYHDIKDITAR | | | |
| | DELWHTNDNQIAIF | | | KEIIENAELLDQI | | | |
| | NRLKLVPKKVDLS | | | AKILTIYQSSEDI | | | |
| | QQKEIPTTLVDDFIL | | | QEELTNLNSELT | | | |
| | SPVVKRSFIQSIKVI | | | QEEIEQISNLKG | | | |
| | NAIIKKYGLPNDIIIE | | | YTGTHNLSLKAI | | | |
| | LAREKNSKDAQKM | | | NLILDELWHTN | | | |
| | INEMQKRNRQTNE | | | DNQIAIFNRLKL | | | |
| | RIEEIIRTTGKENAK | | | VPKKVDLSQQK | | | |
| | YLIEKIKLHDMQEG | | | EIPTTLVDDFILS | | | |
| | KCLYSLEAIPLEDL | | | PVVKRSFIQSIKV | | | |
| | LNNPFNYEVDHIIP | | | INAIIKKYGLPN | | | |
| | RSVSFDNSFNNKVL | | | DIIIELAREKNSK | | | |
| | VKQEENSKKGNRT | | | DAQKMINEMQK | | | |
| | PFQYLSSSDSKISYE | | | RNRQTNERIEEII | | | |
| | TFKKHILNLAKGKG | | | RTTGKENAKYLI | | | |
| | RISKTKKEYLLEER | | | EKIKLHDMQEG | | | |
| | DINRFSVQKDFINR | | | KCLYSLEAIPLE | | | |
| | NLVDTRYATRGLM | | | DLLNNPFNYEV | | | |
| | NLLRSYFRVNNLD | | | DHIIPRSVSFDNS | | | |
| | VKVKSINGGFTSFL | | | FNNKVLVKQEE | | | |
| | RRKWKFKKERNKG | | | ASKKGNRTPFQ | | | |
| | YKHHAEDALIIANA | | | YLSSSDSKISYET | | | |
| | DFIFKEWKKLDKA | | | FKKHILNLAKGK | | | |
| | KKVMENQMFEEKQ | | | GRISKTKKEYLL | | | |
| | AESMPEIETEQEYK | | | EERDINRFSVQK | | | |
| | EIFITPHQIKHIKDF | | | DFINRNLVDTRY | | | |
| | KDYKYSHRVDKKP | | | ATRGLMNLLRS | | | |
| | NRELINDTLYSTRK | | | YFRVNNLDVKV | | | |
| | DDKGNTLIVNNLN | | | KSINGGFTSFLR | | | |
| | GLYDKDNDKLKKL | | | RKWKFKKERNK | | | |
| | INKSPEKLLMYHHD | | | GYKHHAEDALII | | | |
| | PQTYQKLKLIMEQ | | | ANADFIFKEWK | | | |
| | YGDEKNPLYKYYE | | | KLDKAKKVMEN | | | |
| | ETGNYLTKYSKKD | | | QMFEEKQAESM | | | |
| | NGPVIKKIKYYGNK | | | PEIETEQEYKEIF | | | |
| | LNAHLDITDDYPNS | | | ITPHQIKHIKDFK | | | |
| | RNKVVKLSLKPYR | | | DYKYSHRVDKK | | | |
| | FDVYLDNGVYKFV | | | PNRELINDTLYS | | | |
| | TVKNLDVIKKENY | | | TRKDDKGNTLIV | | | |
| | YEVNSKCYEEAKK | | | NNLNGLYDKDN | | | |
| | LKKISNQAEFIASFY | | | DKLKKLINKSPE | | | |
| | NNDLIKINGELYRV | | | KLLMYHHDPQT | | | |
| | IGVNNDLLNRIEVN | | | YQKLKLIMEQY | | | |
| | MIDITYREYLENMN | | | GDEKNPLYKYY | | | |
| | DKRPPRIIKTIASKT | | | EETGNYLTKYS | | | |
| | QSIKKYSTDILGNL | | | KKDNGPVIKKIK | | | |
| | YEVKSKKHPQIIKK | | | YYGNKLNAHLD | | | |
| | G | | | ITDDYPNSRNKV | | | |
| | | | | VKLSLKPYRFDV | | | |
| | | | | YLDNGVYKFVT | | | |
| | | | | VKNLDVIKKEN | | | |
| | | | | YYEVNSKCYEE | | | |
| | | | | AKKLKKISNQAE | | | |
| | | | | FIASFYNNDLIKI | | | |
| | | | | NGELYRVIGVN | | | |
| | | | | NDLLNRIEVNMI | | | |
| | | | | DITYREYLENM | | | |
| | | | | NDKRPPRIIKTIA | | | |
| | | | | SKTQSIKKYSTDI | | | |
| | | | | LGNLYEVKSKK | | | |
| | | | | HPQIIKKG | | | |
| 8681 | DKKYSIGLDIGTNS | H840A | 8690 | DKKYSIGLDIGT | NGCas9 | NA | NGN |
| | VGWAVITDEYKVP | | | NSVGWAVITDE | | | |
| | SKKFKVLGNTDRH | | | YKVPSKKFKVL | | | |
| | SIKKNLIGALLFDSG | | | GNTDRHSIKKNL | | | |
| | ETAEATRLKRTARR | | | IGALLFDSGETA | | | |
| | RYTRRKNRICYLQE | | | EATRLKRTARR | | | |
| | IFSNEMAKVDDSFF | | | RYTRRKNRICYL | | | |
| | HRLEESFLVEEDKK | | | QEIFSNEMAKVD | | | |
| | HERHPIFGNIVDEV | | | DSFFHRLEESFL | | | |
| | AYHEKYPTIYHLRK | | | VEEDKKHERHPI | | | |
| | KLVDSTDKADLRLI | | | FGNIVDEVAYHE | | | |
| | YLALAHMIKFRGH | | | KYPTIYHLRKKL | | | |
| | FLIEGDLNPDNSDV | | | VDSTDKADLRLI | | | |
| | DKLFIQLVQTYNQL | | | YLALAHMIKFR | | | |
| | FEENPINASGVDAK | | | GHFLIEGDLNPD | | | |
| | AILSARLSKSRRLE | | | NSDVDKLFIQLV | | | |
| | NLIAQLPGEKKNGL | | | QTYNQLFEENPI | | | |
| | FGNLIALSLGLTPNF | | | NASGVDAKAILS | | | |
| | KSNFDLAEDAKLQ | | | ARLSKSRRLENL | | | |
| | LSKDTYDDDLDNL | | | IAQLPGEKKNGL | | | |
| | LAQIGDQYADLFLA | | | FGNLIALSLGLT | | | |
| | AKNLSDAILLSDILR | | | PNFKSNFDLAED | | | |
| | VNTEITKAPLSASM | | | AKLQLSKDTYD | | | |
| | IKRYDEHHQDLTLL | | | DDLDNLLAQIG | | | |
| | KALVRQQLPEKYK | | | DQYADLFLAAK | | | |
| | EIFFDQSKNGYAGY | | | NLSDAILLSDILR | | | |
| | IDGGASQEEFYKFI | | | VNTEITKAPLSA | | | |
| | KPILEKMDGTEELL | | | SMIKRYDEHHQ | | | |
| | VKLNREDLLRKQR | | | DLTLLKALVRQ | | | |
| | TFDNGSIPHQIHLGE | | | QLPEKYKEIFFD | | | |
| | LHAILRRQEDFYPF | | | QSKNGYAGYID | | | |
| | LKDNREKIEKILTFR | | | GGASQEEFYKFI | | | |
| | IPYYVGPLARGNSR | | | KPILEKMDGTEE | | | |
| | FAWMTRKSEETITP | | | LLVKLNREDLLR | | | |
| | WNFEEVVDKGASA | | | KQRTFDNGSIPH | | | |
| | QSFIERMTNFDKNL | | | QIHLGELHAILR | | | |
| | PNEKVLPKHSLLYE | | | RQEDFYPFLKDN | | | |
| | YFTVYNELTKVKY | | | REKIEKILTFRIP | | | |
| | VTEGMRKPAFLSG | | | YYVGPLARGNS | | | |
| | EQKKAIVDLLFKTN | | | RFAWMTRKSEE | | | |
| | RKVTVKQLKEDYF | | | TITPWNFEEVVD | | | |
| | KKIECFDSVEISGVE | | | KGASAQSFIERM | | | |
| | DRFNASLGTYHDL | | | TNFDKNLPNEK | | | |
| | LKIIKDKDFLDNEE | | | VLPKHSLLYEYF | | | |
| | NEDILEDIVLTLTLF | | | TVYNELTKVKY | | | |
| | EDREMIEERLKTYA | | | VTEGMRKPAFL | | | |
| | HLFDDKVMKQLKR | | | SGEQKKAIVDLL | | | |
| | RRYTGWGRLSRKLI | | | FKTNRKVTVKQ | | | |
| | NGIRDKQSGKTILD | | | LKEDYFKKIECF | | | |
| | FLKSDGFANRNFM | | | DSVEISGVEDRF | | | |
| | QLIHDDSLTFKEDI | | | NASLGTYHDLL | | | |
| | QKAQVSGQGDSLH | | | KIIKDKDFLDNE | | | |
| | EHIANLAGSPAIKK | | | ENEDILEDIVLTL | | | |
| | GILQTVKVVDELV | | | TLFEDREMIEER | | | |
| | KVMGRHKPENIVIE | | | LKTYAHLFDDK | | | |
| | MARENQTTQKGQK | | | VMKQLKRRRYT | | | |
| | NSRERMKRIEEGIK | | | GWGRLSRKLIN | | | |
| | ELGSQILKEHPVEN | | | GIRDKQSGKTIL | | | |
| | TQLQNEKLYLYYL | | | DFLKSDGFANR | | | |
| | QNGRDMYVDQEL | | | NFMQLIHDDSLT | | | |
| | DINRLSDYDVDHIV | | | FKEDIQKAQVSG | | | |
| | PQSFLKDDSIDNKV | | | QGDSLHEHIANL | | | |
| | LTRSDKNRGKSDN | | | AGSPAIKKGILQ | | | |
| | VPSEEVVKKMKNY | | | TVKVVDELVKV | | | |
| | WRQLLNAKLITQR | | | MGRHKPENIVIE | | | |
| | KFDNLTKAERGGL | | | MARENQTTQKG | | | |
| | SELDKAGFIKRQLV | | | QKNSRERMKRIE | | | |
| | ETRQITKHVAQILD | | | EGIKELGSQILKE | | | |
| | SRMNTKYDENDKL | | | HPVENTQLQNE | | | |
| | IREVKVITLKSKLVS | | | KLYLYYLQNGR | | | |
| | DFRKDFQFYKVREI | | | DMYVDQELDIN | | | |
| | NNYHHAHDAYLN | | | RLSDYDVDAIVP | | | |
| | AVVGTALIKKYPKL | | | QSFLKDDSIDNK | | | |
| | ESEFVYGDYKVYD | | | VLTRSDKNRGK | | | |
| | VRKMIAKSEQEIGK | | | SDNVPSEEVVK | | | |
| | ATAKYFFYSNIMNF | | | KMKNYWRQLL | | | |
| | FKTEITLANGEIRKR | | | NAKLITQRKFDN | | | |
| | PLIETNGETGEIVW | | | LTKAERGGLSEL | | | |
| | DKGRDFATVRKVL | | | DKAGFIKRQLVE | | | |
| | SMPQVNIVKKTEV | | | TRQITKHVAQIL | | | |
| | QTGGFSKESIRPKR | | | DSRMNTKYDEN | | | |
| | NSDKLIARKKDWD | | | DKLIREVKVITL | | | |
| | PKKYGGFVSPTVA | | | KSKLVSDFRKDF | | | |
| | YSVLVVAKVEKGK | | | QFYKVREINNY | | | |
| | SKKLKSVKELLGITI | | | HHAHDAYLNAV | | | |
| | MERSSFEKNPIDFL | | | VGTALIKKYPKL | | | |
| | EAKGYKEVKKDLII | | | ESEFVYGDYKV | | | |
| | KLPKYSLFELENGR | | | YDVRKMIAKSE | | | |
| | KRMLASARFLQKG | | | QEIGKATAKYFF | | | |
| | NELALPSKYVNFLY | | | YSNIMNFFKTEI | | | |
| | LASHYEKLKGSPED | | | TLANGEIRKRPLI | | | |
| | NEQKQLFVEQHKH | | | ETNGETGEIVW | | | |
| | YLDEIIEQISEFSKR | | | DKGRDFATVRK | | | |
| | VILADANLDKVLSA | | | VLSMPQVNIVK | | | |
| | YNKHRDKPIREQAE | | | KTEVQTGGFSKE | | | |
| | NIIHLFTLTNLGAPR | | | SIRPKRNSDKLIA | | | |
| | AFKYFDTTIDRKVY | | | RKKDWDPKKY | | | |
| | RSTKEVLDATLIHQ | | | GGFVSPTVAYSV | | | |
| | SITGLYETRIDLSQL | | | LVVAKVEKGKS | | | |
| | GGD | | | KKLKSVKELLGI | | | |
| | | | | TIMERSSFEKNPI | | | |
| | | | | DFLEAKGYKEV | | | |
| | | | | KKDLIIKLPKYS | | | |
| | | | | LFELENGRKRM | | | |
| | | | | LASARFLQKGN | | | |
| | | | | ELALPSKYVNFL | | | |
| | | | | YLASHYEKLKG | | | |
| | | | | SPEDNEQKQLFV | | | |
| | | | | EQHKHYLDEIIE | | | |
| | | | | QISEFSKRVILAD | | | |
| | | | | ANLDKVLSAYN | | | |
| | | | | KHRDKPIREQAE | | | |
| | | | | NIIHLFTLTNLGA | | | |
| | | | | PRAFKYFDTTID | | | |
| | | | | RKVYRSTKEVL | | | |
| | | | | DATLIHQSITGL | | | |
| | | | | YETRIDLSQLGG | | | |
| | | | | D | | | |
| 8682 | ATRSFILKIEPNEEV | NA | | NA | Cas12b | WP_095142515 | TTTA |
| | KKGLWKTHEVLNH | | | | | | |
| | GIAYYMNILKLIRQ | | | | | | |
| | EAIYEHHEQDPKNP | | | | | | |
| | KKVSKAEIQAELW | | | | | | |
| | DFVLKMQKCNSFT | | | | | | |
| | HEVDKDEVFNILRE | | | | | | |
| | LYEELVPSSVEKKG | | | | | | |
| | EANQLSNKFLYPLV | | | | | | |
| | DPNSQSGKGTASSG | | | | | | |
| | RKPRWYNIKIAGD | | | | | | |
| | PSWEEEKKKWEED | | | | | | |
| | KKKDPLAKILGKLA | | | | | | |
| | EYGLIPLFIPYTDSN | | | | | | |
| | EPIVKEIKWMEKSR | | | | | | |
| | NQSVRRLDKDMFI | | | | | | |
| | QALERFLSWESWN | | | | | | |
| | LKVKEEYEKVEKE | | | | | | |
| | YKTLEERIKEDIQA | | | | | | |
| | LKALEQYEKERQE | | | | | | |
| | QLLRDTLNTNEYRL | | | | | | |
| | SKRGLRGWREIIQK | | | | | | |
| | WLKMDENEPSEKY | | | | | | |
| | LEVFKDYQRKHPR | | | | | | |
| | EAGDYSVYEFLSK | | | | | | |
| | KENHFIWRNHPEYP | | | | | | |
| | YLYATFCEIDKKKK | | | | | | |
| | DAKQQATFTLADPI | | | | | | |
| | NHPLWVRFEERSGS | | | | | | |
| | NLNKYRILTEQLHT | | | | | | |
| | EKLKKKLTVQLDR | | | | | | |
| | LIYPTESGGWEEKG | | | | | | |
| | KVDIVLLPSRQFYN | | | | | | |
| | QIFLDIEEKGKHAF | | | | | | |
| | TYKDESIKFPLKGT | | | | | | |
| | LGGARVQFDRDHL | | | | | | |
| | RRYPHKVESGNVG | | | | | | |
| | RIYFNMTVNIEPTES | | | | | | |
| | PVSKSLKIHRDDFP | | | | | | |
| | KVVNFKPKELTEWI | | | | | | |
| | KDSKGKKLKSGIES | | | | | | |
| | LEIGLRVMSIDLGQ | | | | | | |
| | RQAAAASIFEVVDQ | | | | | | |
| | KPDIEGKLFFPIKGT | | | | | | |
| | ELYAVHRASFNIKL | | | | | | |
| | PGETLVKSREVLRK | | | | | | |
| | AREDNLKLMNQKL | | | | | | |
| | NFLRNVLHFQQFED | | | | | | |
| | ITEREKRVTKWISR | | | | | | |
| | QENSDVPLVYQDE | | | | | | |
| | LIQIRELMYKPYKD | | | | | | |
| | WVAFLKQLHKRLE | | | | | | |
| | VEIGKEVKHWRKS | | | | | | |
| | LSDGRKGLYGISLK | | | | | | |
| | NIDEIDRTRKFLLR | | | | | | |
| | WSLRPTEPGEVRRL | | | | | | |
| | EPGQRFAIDQLNHL | | | | | | |
| | NALKEDRLKKMAN | | | | | | |
| | TIIMHALGYCYDVR | | | | | | |
| | KKKWQAKNPACQI | | | | | | |
| | ILFEDLSNYNPYEE | | | | | | |
| | RSRFENSKLMKWS | | | | | | |
| | RREIPRQVALQGEI | | | | | | |
| | YGLQVGEVGAQFS | | | | | | |
| | SRFHAKTGSPGIRC | | | | | | |
| | SVVTKEKLQDNRFF | | | | | | |
| | KNLQREGRLTLDKI | | | | | | |
| | AVLKEGDLYPDKG | | | | | | |
| | GEKFISLSKDRKCV | | | | | | |
| | TTHADINAAQNLQ | | | | | | |
| | KRFWTRTHGFYKV | | | | | | |
| | YCKAYQVDGQTVY | | | | | | |
| | IPESKDQKQKIIEEF | | | | | | |
| | GEGYFILKDGVYE | | | | | | |
| | WVNAGKLKIKKGS | | | | | | |
| | SKQSSSELVDSDIL | | | | | | |
| | KDSFDLASELKGEK | | | | | | |
| | LMLYRDPSGNVFPS | | | | | | |
| | DKWMAAGVFFGK | | | | | | |
| | LERILISKLTNQYSI | | | | | | |
| | STIEDDSSKQSM | | | | | | |
| 8683 | DKKYSIGLDIGTNS | H840A | 8691 | DKKYSIGLDIGT | VRQR | NA | NGA |
| | VGWAVITDEYKVP | | | NSVGWAVITDE | | | |
| | SKKFKVLGNTDRH | | | YKVPSKKFKVL | | | |
| | SIKKNLIGALLFDSG | | | GNTDRHSIKKNL | | | |
| | ETAEATRLKRTARR | | | IGALLFDSGETA | | | |
| | RYTRRKNRICYLQE | | | EATRLKRTARR | | | |
| | IFSNEMAKVDDSFF | | | RYTRRKNRICYL | | | |
| | HRLEESFLVEEDKK | | | QEIFSNEMAKVD | | | |
| | HERHPIFGNIVDEV | | | DSFFHRLEESFL | | | |
| | AYHEKYPTIYHLRK | | | VEEDKKHERHPI | | | |
| | KLVDSTDKADLRLI | | | FGNIVDEVAYHE | | | |
| | YLALAHMIKFRGH | | | KYPTIYHLRKKL | | | |
| | FLIEGDLNPDNSDV | | | VDSTDKADLRLI | | | |
| | DKLFIQLVQTYNQL | | | YLALAHMIKFR | | | |
| | FEENPINASGVDAK | | | GHFLIEGDLNPD | | | |
| | AILSARLSKSRRLE | | | NSDVDKLFIQLV | | | |
| | NLIAQLPGEKKNGL | | | QTYNQLFEENPI | | | |
| | FGNLIALSLGLTPNF | | | NASGVDAKAILS | | | |
| | KSNFDLAEDAKLQ | | | ARLSKSRRLENL | | | |
| | LSKDTYDDDLDNL | | | IAQLPGEKKNGL | | | |
| | LAQIGDQYADLFLA | | | FGNLIALSLGLT | | | |
| | AKNLSDAILLSDILR | | | PNFKSNFDLAED | | | |
| | VNTEITKAPLSASM | | | AKLQLSKDTYD | | | |
| | IKRYDEHHQDLTLL | | | DDLDNLLAQIG | | | |
| | KALVRQQLPEKYK | | | DQYADLFLAAK | | | |
| | EIFFDQSKNGYAGY | | | NLSDAILLSDILR | | | |
| | IDGGASQEEFYKFI | | | VNTEITKAPLSA | | | |
| | KPILEKMDGTEELL | | | SMIKRYDEHHQ | | | |
| | VKLNREDLLRKQR | | | DLTLLKALVRQ | | | |
| | TFDNGSIPHQIHLGE | | | QLPEKYKEIFFD | | | |
| | LHAILRRQEDFYPF | | | QSKNGYAGYID | | | |
| | LKDNREKIEKILTFR | | | GGASQEEFYKFI | | | |
| | IPYYVGPLARGNSR | | | KPILEKMDGTEE | | | |
| | FAWMTRKSEETITP | | | LLVKLNREDLLR | | | |
| | WNFEEVVDKGASA | | | KQRTFDNGSIPH | | | |
| | QSFIERMTNFDKNL | | | QIHLGELHAILR | | | |
| | PNEKVLPKHSLLYE | | | RQEDFYPFLKDN | | | |
| | YFTVYNELTKVKY | | | REKIEKILTFRIP | | | |
| | VTEGMRKPAFLSG | | | YYVGPLARGNS | | | |
| | EQKKAIVDLLFKTN | | | RFAWMTRKSEE | | | |
| | RKVTVKQLKEDYF | | | TITPWNFEEVVD | | | |
| | KKIECFDSVEISGVE | | | KGASAQSFIERM | | | |
| | DRFNASLGTYHDL | | | TNFDKNLPNEK | | | |
| | LKIIKDKDFLDNEE | | | VLPKHSLLYEYF | | | |
| | NEDILEDIVLTLTLF | | | TVYNELTKVKY | | | |
| | EDREMIEERLKTYA | | | VTEGMRKPAFL | | | |
| | HLFDDKVMKQLKR | | | SGEQKKAIVDLL | | | |
| | RRYTGWGRLSRKLI | | | FKTNRKVTVKQ | | | |
| | NGIRDKQSGKTILD | | | LKEDYFKKIECF | | | |
| | FLKSDGFANRNFM | | | DSVEISGVEDRF | | | |
| | QLIHDDSLTFKEDI | | | NASLGTYHDLL | | | |
| | QKAQVSGQGDSLH | | | KIIKDKDFLDNE | | | |
| | EHIANLAGSPAIKK | | | ENEDILEDIVLTL | | | |
| | GILQTVKVVDELV | | | TLFEDREMIEER | | | |
| | KVMGRHKPENIVIE | | | LKTYAHLFDDK | | | |
| | MARENQTTQKGQK | | | VMKQLKRRRYT | | | |
| | NSRERMKRIEEGIK | | | GWGRLSRKLIN | | | |
| | ELGSQILKEHPVEN | | | GIRDKQSGKTIL | | | |
| | TQLQNEKLYLYYL | | | DFLKSDGFANR | | | |
| | QNGRDMYVDQEL | | | NFMQLIHDDSLT | | | |
| | DINRLSDYDVDHIV | | | FKEDIQKAQVSG | | | |
| | PQSFLKDDSIDNKV | | | QGDSLHEHIANL | | | |
| | LTRSDKNRGKSDN | | | AGSPAIKKGILQ | | | |
| | VPSEEVVKKMKNY | | | TVKVVDELVKV | | | |
| | WRQLLNAKLITQR | | | MGRHKPENIVIE | | | |
| | KFDNLTKAERGGL | | | MARENQTTQKG | | | |
| | SELDKAGFIKRQLV | | | QKNSRERMKRIE | | | |
| | ETRQITKHVAQILD | | | EGIKELGSQILKE | | | |
| | SRMNTKYDENDKL | | | HPVENTQLQNE | | | |
| | IREVKVITLKSKLVS | | | KLYLYYLQNGR | | | |
| | DFRKDFQFYKVREI | | | DMYVDQELDIN | | | |
| | NNYHHAHDAYLN | | | RLSDYDVDAIVP | | | |
| | AVVGTALIKKYPKL | | | QSFLKDDSIDNK | | | |
| | ESEFVYGDYKVYD | | | VLTRSDKNRGK | | | |
| | VRKMIAKSEQEIGK | | | SDNVPSEEVVK | | | |
| | ATAKYFFYSNIMNF | | | KMKNYWRQLL | | | |
| | FKTEITLANGEIRKR | | | NAKLITQRKFDN | | | |
| | PLIETNGETGEIVW | | | LTKAERGGLSEL | | | |
| | DKGRDFATVRKVL | | | DKAGFIKRQLVE | | | |
| | SMPQVNIVKKTEV | | | TRQITKHVAQIL | | | |
| | QTGGFSKESILPKR | | | DSRMNTKYDEN | | | |
| | NSDKLIARKKDWD | | | DKLIREVKVITL | | | |
| | PKKYGGFVSPTVA | | | KSKLVSDFRKDF | | | |
| | YSVLVVAKVEKGK | | | QFYKVREINNY | | | |
| | SKKLKSVKELLGITI | | | HHAHDAYLNAV | | | |
| | MERSSFEKNPIDFL | | | VGTALIKKYPKL | | | |
| | EAKGYKEVKKDLII | | | ESEFVYGDYKV | | | |
| | KLPKYSLFELENGR | | | YDVRKMIAKSE | | | |
| | KRMLASARELQKG | | | QEIGKATAKYFF | | | |
| | NELALPSKYVNFLY | | | YSNIMNFFKTEI | | | |
| | LASHYEKLKGSPED | | | TLANGEIRKRPLI | | | |
| | NEQKQLFVEQHKH | | | ETNGETGEIVW | | | |
| | YLDEIIEQISEFSKR | | | DKGRDFATVRK | | | |
| | VILADANLDKVLSA | | | VLSMPQVNIVK | | | |
| | YNKHRDKPIREQAE | | | KTEVQTGGFSKE | | | |
| | NIIHLFTLTNLGAPA | | | SILPKRNSDKLIA | | | |
| | AFKYFDTTIDRKQY | | | RKKDWDPKKY | | | |
| | RSTKEVLDATLIHQ | | | GGFVSPTVAYSV | | | |
| | SITGLYETRIDLSQL | | | LVVAKVEKGKS | | | |
| | GGD | | | KKLKSVKELLGI | | | |
| | | | | TIMERSSFEKNPI | | | |
| | | | | DFLEAKGYKEV | | | |
| | | | | KKDLIIKLPKYS | | | |
| | | | | LFELENGRKRM | | | |
| | | | | LASARELQKGN | | | |
| | | | | ELALPSKYVNFL | | | |
| | | | | YLASHYEKLKG | | | |
| | | | | SPEDNEQKQLFV | | | |
| | | | | EQHKHYLDEIIE | | | |
| | | | | QISEFSKRVILAD | | | |
| | | | | ANLDKVLSAYN | | | |
| | | | | KHRDKPIREQAE | | | |
| | | | | NIIHLFTLTNLGA | | | |
| | | | | PAAFKYFDTTID | | | |
| | | | | RKQYRSTKEVL | | | |
| | | | | DATLIHQSITGL | | | |
| | | | | YETRIDLSQLGG | | | |
| | | | | D | | | |
| 8684 | DKKYSIGLDIGTNS | H840A | 8692 | DKKYSIGLDIGT | SpRY | NA | NRN |
| | VGWAVITDEYKVP | | | NSVGWAVITDE | | | |
| | SKKFKVLGNTDRH | | | YKVPSKKFKVL | | | |
| | SIKKNLIGALLFDSG | | | GNTDRHSIKKNL | | | |
| | ETAERTRLKRTARR | | | IGALLFDSGETA | | | |
| | RYTRRKNRICYLQE | | | ERTRLKRTARRR | | | |
| | IFSNEMAKVDDSFF | | | YTRRKNRICYLQ | | | |
| | HRLEESFLVEEDKK | | | EIFSNEMAKVDD | | | |
| | HERHPIFGNIVDEV | | | SFFHRLEESFLV | | | |
| | AYHEKYPTIYHLRK | | | EEDKKHERHPIF | | | |
| | KLVDSTDKADLRLI | | | GNIVDEVAYHE | | | |
| | YLALAHMIKFRGH | | | KYPTIYHLRKKL | | | |
| | FLIEGDLNPDNSDV | | | VDSTDKADLRLI | | | |
| | DKLFIQLVQTYNQL | | | YLALAHMIKFR | | | |
| | FEENPINASGVDAK | | | GHFLIEGDLNPD | | | |
| | AILSARLSKSRRLE | | | NSDVDKLFIQLV | | | |
| | NLIAQLPGEKKNGL | | | QTYNQLFEENPI | | | |
| | FGNLIALSLGLTPNF | | | NASGVDAKAILS | | | |
| | KSNFDLAEDAKLQ | | | ARLSKSRRLENL | | | |
| | LSKDTYDDDLDNL | | | IAQLPGEKKNGL | | | |
| | LAQIGDQYADLFLA | | | FGNLIALSLGLT | | | |
| | AKNLSDAILLSDILR | | | PNFKSNFDLAED | | | |
| | VNTEITKAPLSASM | | | AKLQLSKDTYD | | | |
| | IKRYDEHHQDLTLL | | | DDLDNLLAQIG | | | |
| | KALVRQQLPEKYK | | | DQYADLFLAAK | | | |
| | EIFFDQSKNGYAGY | | | NLSDAILLSDILR | | | |
| | IDGGASQEEFYKFI | | | VNTEITKAPLSA | | | |
| | KPILEKMDGTEELL | | | SMIKRYDEHHQ | | | |
| | VKLNREDLLRKQR | | | DLTLLKALVRQ | | | |
| | TFDNGSIPHQIHLGE | | | QLPEKYKEIFFD | | | |
| | LHAILRRQEDFYPF | | | QSKNGYAGYID | | | |
| | LKDNREKIEKILTFR | | | GGASQEEFYKFI | | | |
| | IPYYVGPLARGNSR | | | KPILEKMDGTEE | | | |
| | FAWMTRKSEETITP | | | LLVKLNREDLLR | | | |
| | WNFEEVVDKGASA | | | KQRTFDNGSIPH | | | |
| | QSFIERMTNFDKNL | | | QIHLGELHAILR | | | |
| | PNEKVLPKHSLLYE | | | RQEDFYPFLKDN | | | |
| | YFTVYNELTKVKY | | | REKIEKILTFRIP | | | |
| | VTEGMRKPAFLSG | | | YYVGPLARGNS | | | |
| | EQKKAIVDLLFKTN | | | RFAWMTRKSEE | | | |
| | RKVTVKQLKEDYF | | | TITPWNFEEVVD | | | |
| | KKIECFDSVEISGVE | | | KGASAQSFIERM | | | |
| | DRFNASLGTYHDL | | | TNFDKNLPNEK | | | |
| | LKIIKDKDFLDNEE | | | VLPKHSLLYEYF | | | |
| | EDREMIEERLKTYA | | | VTEGMRKPAFL | | | |
| | HLFDDKVMKQLKR | | | SGEQKKAIVDLL | | | |
| | RRYTGWGRLSRKLI | | | FKTNRKVTVKQ | | | |
| | NGIRDKQSGKTILD | | | LKEDYFKKIECF | | | |
| | FLKSDGFANRNFM | | | DSVEISGVEDRF | | | |
| | QLIHDDSLTFKEDI | | | NASLGTYHDLL | | | |
| | QKAQVSGQGDSLH | | | KIIKDKDFLDNE | | | |
| | EHIANLAGSPAIKK | | | ENEDILEDIVLTL | | | |
| | GILQTVKVVDELV | | | TLFEDREMIEER | | | |
| | KVMGRHKPENIVIE | | | LKTYAHLFDDK | | | |
| | MARENQTTQKGQK | | | VMKQLKRRRYT | | | |
| | NSRERMKRIEEGIK | | | GWGRLSRKLIN | | | |
| | ELGSQILKEHPVEN | | | GIRDKQSGKTIL | | | |
| | TQLQNEKLYLYYL | | | DFLKSDGFANR | | | |
| | QNGRDMYVDQEL | | | NFMQLIHDDSLT | | | |
| | DINRLSDYDVDHIV | | | FKEDIQKAQVSG | | | |
| | PQSFLKDDSIDNKV | | | QGDSLHEHIANL | | | |
| | LTRSDKNRGKSDN | | | AGSPAIKKGILQ | | | |
| | VPSEEVVKKMKNY | | | TVKVVDELVKV | | | |
| | WRQLLNAKLITQR | | | MGRHKPENIVIE | | | |
| | KFDNLTKAERGGL | | | MARENQTTQKG | | | |
| | SELDKAGFIKRQLV | | | QKNSRERMKRIE | | | |
| | ETRQITKHVAQILD | | | EGIKELGSQILKE | | | |
| | SRMNTKYDENDKL | | | HPVENTQLQNE | | | |
| | IREVKVITLKSKLVS | | | KLYLYYLQNGR | | | |
| | DFRKDFQFYKVREI | | | DMYVDQELDIN | | | |
| | NNYHHAHDAYLN | | | RLSDYDVDAIVP | | | |
| | AVVGTALIKKYPKL | | | QSFLKDDSIDNK | | | |
| | ESEFVYGDYKVYD | | | VLTRSDKNRGK | | | |
| | VRKMIAKSEQEIGK | | | SDNVPSEEVVK | | | |
| | ATAKYFFYSNIMNF | | | KMKNYWRQLL | | | |
| | FKTEITLANGEIRKR | | | NAKLITQRKFDN | | | |
| | PLIETNGETGEIVW | | | LTKAERGGLSEL | | | |
| | DKGRDFATVRKVL | | | DKAGFIKRQLVE | | | |
| | SMPQVNIVKKTEV | | | TRQITKHVAQIL | | | |
| | QTGGFSKESIRPKR | | | DSRMNTKYDEN | | | |
| | NSDKLIARKKDWD | | | DKLIREVKVITL | | | |
| | PKKYGGFLWPTVA | | | KSKLVSDFRKDF | | | |
| | YSVLVVAKVEKGK | | | QFYKVREINNY | | | |
| | SKKLKSVKELLGITI | | | HHAHDAYLNAV | | | |
| | MERSSFEKNPIDFL | | | VGTALIKKYPKL | | | |
| | EAKGYKEVKKDLII | | | ESEFVYGDYKV | | | |
| | KLPKYSLFELENGR | | | YDVRKMIAKSE | | | |
| | KRMLASAKQLQKG | | | QEIGKATAKYFF | | | |
| | NELALPSKYVNFLY | | | YSNIMNFFKTEI | | | |
| | LASHYEKLKGSPED | | | TLANGEIRKRPLI | | | |
| | NEQKQLFVEQHKH | | | ETNGETGEIVW | | | |
| | YLDEIIEQISEFSKR | | | DKGRDFATVRK | | | |
| | VILADANLDKVLSA | | | VLSMPQVNIVK | | | |
| | YNKHRDKPIREQAE | | | KTEVQTGGFSKE | | | |
| | NIIHLFTLTRLGAPR | | | SIRPKRNSDKLIA | | | |
| | AFKYFDTTIDPKQY | | | RKKDWDPKKY | | | |
| | RSTKEVLDATLIHQ | | | GGFLWPTVAYS | | | |
| | SITGLYETRIDLSQL | | | VLVVAKVEKGK | | | |
| | GGD | | | SKKLKSVKELLG | | | |
| | | | | ITIMERSSFEKNP | | | |
| | | | | IDFLEAKGYKEV | | | |
| | | | | KKDLIIKLPKYS | | | |
| | | | | LFELENGRKRM | | | |
| | | | | LASAKQLQKGN | | | |
| | | | | ELALPSKYVNFL | | | |
| | | | | YLASHYEKLKG | | | |
| | | | | SPEDNEQKQLFV | | | |
| | | | | EQHKHYLDEIIE | | | |
| | | | | QISEFSKRVILAD | | | |
| | | | | ANLDKVLSAYN | | | |
| | | | | KHRDKPIREQAE | | | |
| | | | | NIIHLFTLTRLGA | | | |
| | | | | PRAFKYFDTTID | | | |
| | | | | PKQYRSTKEVL | | | |
| | | | | DATLIHQSITGL | | | |
| | | | | YETRIDLSQLGG | | | |
| | | | | D | | | |
| 8685 | NQKFILGLDIGITSV | N585A | 8693 | NQKFILGLDIGIT | SRGN3.1 | NA | NNGG |
| | GYGLIDYETKNIID | | | SVGYGLIDYETK | | | |
| | AGVRLFPEANVEN | | | NIIDAGVRLFPE | | | |
| | NEGRRSKRGSRRL | | | ANVENNEGRRS | | | |
| | KRRRIHRLERVKLL | | | KRGSRRLKRRRI | | | |
| | LTEYDLINKEQIPTS | | | HRLERVKLLLTE | | | |
| | NNPYQIRVKGLSEI | | | YDLINKEQIPTS | | | |
| | LSKDELAIALLHLA | | | NNPYQIRVKGLS | | | |
| | KRRGIHNVDVAAD | | | EILSKDELAIALL | | | |
| | KEETASDSLSTKDQ | | | HLAKRRGIHNV | | | |
| | INKNAKFLESRYVC | | | DVAADKEETAS | | | |
| | ELQKERLENEGHV | | | DSLSTKDQINKN | | | |
| | RGVENRFLTKDIVR | | | AKFLESRYVCEL | | | |
| | EAKKIIDTQMQYYP | | | QKERLENEGHV | | | |
| | EIDETFKEKYISLVE | | | RGVENRFLTKDI | | | |
| | TRREYFEGPGQGSP | | | VREAKKIIDTQM | | | |
| | FGWNGDLKKWYE | | | QYYPEIDETFKE | | | |
| | MLMGHCTYFPQEL | | | KYISLVETRREY | | | |
| | RSVKYAYSADLEN | | | FEGPGQGSPFG | | | |
| | ALNDLNNLIIQRDN | | | WNGDLKKWYE | | | |
| | SEKLEYHEKYHIIE | | | MLMGHCTYFPQ | | | |
| | NVFKQKKKPTLKQI | | | ELRSVKYAYSA | | | |
| | AKEIGVNPEDIKGY | | | DLFNALNDLNN | | | |
| | RITKSGTPEFTSFKL | | | LIIQRDNSEKLE | | | |
| | FHDLKKVVKDHAI | | | YHEKYHIIENVF | | | |
| | LDDIDLLNQIAEILT | | | KQKKKPTLKQIA | | | |
| | IYQDKDSIVAELGQ | | | KEIGVNPEDIKG | | | |
| | LEYLMSEADKQSIS | | | YRITKSGTPEFTS | | | |
| | ELTGYTGTHSLSLK | | | FKLFHDLKKVV | | | |
| | CMNMIIDELWHSS | | | KDHAILDDIDLL | | | |
| | MNQMEVFTYLNM | | | NQIAEILTIYQDK | | | |
| | RPKKYELKGYQRIP | | | DSIVAELGQLEY | | | |
| | TDMIDDAILSPVVK | | | LMSEADKQSISE | | | |
| | RTFIQSINVINKVIE | | | LTGYTGTHSLSL | | | |
| | KYGIPEDIIIELARE | | | KCMNMIIDELW | | | |
| | NNSDDRKKFINNLQ | | | HSSMNQMEVFT | | | |
| | KKNEATRKRINEIIG | | | YLNMRPKKYEL | | | |
| | QTGNQNAKRIVEKI | | | KGYQRIPTDMID | | | |
| | RLHDQQEGKCLYS | | | DAILSPVVKRTFI | | | |
| | LESIPLEDLLNNPN | | | QSINVINKVIEK | | | |
| | HYEVDHIIPRSVSFD | | | YGIPEDIIIELARE | | | |
| | NSYHNKVLVKQSE | | | NNSDDRKKFINN | | | |
| | NSKKSNLTPYQYFN | | | LQKKNEATRKRI | | | |
| | SGKSKLSYNQFKQ | | | NEIIGQTGNQNA | | | |
| | HILNLSKSQDRISK | | | KRIVEKIRLHDQ | | | |
| | KKKEYLLEERDINK | | | QEGKCLYSLESI | | | |
| | FEVQKEFINRNLVD | | | PLEDLLNNPNHY | | | |
| | TRYATRELTNYLK | | | EVDHIIPRSVSFD | | | |
| | AYFSANNMNVKVK | | | NSYHNKVLVKQ | | | |
| | TINGSFTDYLRKVW | | | SEASKKSNLTPY | | | |
| | KFKKERNHGYKHH | | | QYFNSGKSKLSY | | | |
| | AEDALIIANADFLF | | | NQFKQHILNLSK | | | |
| | KENKKLKAVNSVL | | | SQDRISKKKKEY | | | |
| | EKPEIETKQLDIQV | | | LLEERDINKFEV | | | |
| | DSEDNYSEMFIIPK | | | QKEFINRNLVDT | | | |
| | QVQDIKDFRNFKYS | | | RYATRELTNYL | | | |
| | HRVDKKPNRQLIN | | | KAYFSANNMNV | | | |
| | DTLYSTRKKDNST | | | KVKTINGSFTDY | | | |
| | YIVQTIKDIYAKDN | | | LRKVWKFKKER | | | |
| | TTLKKQFDKSPEKF | | | NHGYKHHAEDA | | | |
| | LMYQHDPRTFEKL | | | LIIANADFLFKE | | | |
| | EVIMKQYANEKNP | | | NKKLKAVNSVL | | | |
| | LAKYHEETGEYLT | | | EKPEIETKQLDIQ | | | |
| | KYSKKNNGPIVKSL | | | VDSEDNYSEMFI | | | |
| | KYIGNKLGSHLDVT | | | IPKQVQDIKDFR | | | |
| | HQFKSSTKKLVKLS | | | NFKYSHRVDKK | | | |
| | IKNYRFDVYLTEKG | | | PNRQLINDTLYS | | | |
| | YKFVTIAYLNVFKK | | | TRKKDNSTYIVQ | | | |
| | DNYYYIPKDKYQE | | | TIKDIYAKDNTT | | | |
| | LKEKKKIKDTDQFI | | | LKKQFDKSPEKF | | | |
| | ASFYKNDLIKLNGD | | | LMYQHDPRTFE | | | |
| | LYKIIGVNSDDRNII | | | KLEVIMKQYAN | | | |
| | ELDYYDIKYKDYC | | | EKNPLAKYHEE | | | |
| | EINNIKGEPRIKKTI | | | TGEYLTKYSKK | | | |
| | GKKTESIEKFTTDV | | | NNGPIVKSLKYI | | | |
| | LGNLYLHSTEKAPQ | | | GNKLGSHLDVT | | | |
| | LIFKRGL | | | HQFKSSTKKLV | | | |
| | | | | KLSIKNYRFDVY | | | |
| | | | | LTEKGYKFVTIA | | | |
| | | | | YLNVFKKDNYY | | | |
| | | | | YIPKDKYQELKE | | | |
| | | | | KKKIKDTDQFIA | | | |
| | | | | SFYKNDLIKLNG | | | |
| | | | | DLYKIIGVNSDD | | | |
| | | | | RNIIELDYYDIK | | | |
| | | | | YKDYCEINNIKG | | | |
| | | | | EPRIKKTIGKKT | | | |
| | | | | ESIEKFTTDVLG | | | |
| | | | | NLYLHSTEKAPQ | | | |
| | | | | LIFKRGL | | | |
| 8686 | NQKFILGLDIGITSV | N585A | 8694 | NQKFILGLDIGIT | sRGN3.3 | NA | NNGG |
| | GYGLIDYETKNIID | | | SVGYGLIDYETK | | | |
| | AGVRLFPEANVEN | | | NIIDAGVRLFPE | | | |
| | NEGRRSKRGSRRL | | | ANVENNEGRRS | | | |
| | KRRRIHRLERVKLL | | | KRGSRRLKRRRI | | | |
| | LTEYDLINKEQIPTS | | | HRLERVKLLLTE | | | |
| | NNPYQIRVKGLSEI | | | YDLINKEQIPTS | | | |
| | LSKDELAIALLHLA | | | NNPYQIRVKGLS | | | |
| | KRRGIHNVDVAAD | | | EILSKDELAIALL | | | |
| | KEETASDSLSTKDQ | | | HLAKRRGIHNV | | | |
| | INKNAKFLESRYVC | | | DVAADKEETAS | | | |
| | ELQKERLENEGHV | | | DSLSTKDQINKN | | | |
| | RGVENRFLTKDIVR | | | AKFLESRYVCEL | | | |
| | EAKKIIDTQMQYYP | | | QKERLENEGHV | | | |
| | EIDETFKEKYISLVE | | | RGVENRFLTKDI | | | |
| | TRREYFEGPGQGSP | | | VREAKKIIDTQM | | | |
| | FGWNGDLKKWYE | | | QYYPEIDETFKE | | | |
| | MLMGHCTYFPQEL | | | KYISLVETRREY | | | |
| | RSVKYAYSADLEN | | | FEGPGQGSPFG | | | |
| | ALNDLNNLIIQRDN | | | WNGDLKKWYE | | | |
| | SEKLEYHEKYHIIE | | | MLMGHCTYFPQ | | | |
| | NVFKQKKKPTLKQI | | | ELRSVKYAYSA | | | |
| | AKEIGVNPEDIKGY | | | DLFNALNDLNN | | | |
| | RITKSGTPEFTSFKL | | | LIIQRDNSEKLE | | | |
| | FHDLKKVVKDHAI | | | YHEKYHIIENVF | | | |
| | LDDIDLLNQIAEILT | | | KQKKKPTLKQIA | | | |
| | IYQDKDSIVAELGQ | | | KEIGVNPEDIKG | | | |
| | LEYLMSEADKQSIS | | | YRITKSGTPEFTS | | | |
| | ELTGYTGTHSLSLK | | | FKLFHDLKKVV | | | |
| | CMNMIIDELWHSS | | | KDHAILDDIDLL | | | |
| | MNQMEVFTYLNM | | | NQIAEILTIYQDK | | | |
| | RPKKYELKGYQRIP | | | DSIVAELGQLEY | | | |
| | TDMIDDAILSPVVK | | | LMSEADKQSISE | | | |
| | RTFIQSINVINKVIE | | | LTGYTGTHSLSL | | | |
| | KYGIPEDIIIELARE | | | KCMNMIIDELW | | | |
| | NNSDDRKKFINNLQ | | | HSSMNQMEVFT | | | |
| | KKNEATRKRINEIIG | | | YLNMRPKKYEL | | | |
| | QTGNQNAKRIVEKI | | | KGYQRIPTDMID | | | |
| | RLHDQQEGKCLYS | | | DAILSPVVKRTFI | | | |
| | LESIPLEDLLNNPN | | | QSINVINKVIEK | | | |
| | HYEVDHIIPRSVSFD | | | YGIPEDIIIELARE | | | |
| | NSYHNKVLVKQSE | | | NNSDDRKKFINN | | | |
| | NSKKSNLTPYQYFN | | | LQKKNEATRKRI | | | |
| | SGKSKLSYNQFKQ | | | NEIIGQTGNQNA | | | |
| | HILNLSKSQDRISK | | | KRIVEKIRLHDQ | | | |
| | KKKEYLLEERDINK | | | QEGKCLYSLESI | | | |
| | FEVQKEFINRNLVD | | | PLEDLLNNPNHY | | | |
| | TRYATRELTSYLKA | | | EVDHIIPRSVSFD | | | |
| | YFSANNMDVKVKT | | | NSYHNKVLVKQ | | | |
| | INGSFTNHLRKVW | | | SEASKKSNLTPY | | | |
| | RFDKYRNHGYKHH | | | QYFNSGKSKLSY | | | |
| | AEDALIIANADFLF | | | NQFKQHILNLSK | | | |
| | KENKKLQNTNKILE | | | SQDRISKKKKEY | | | |
| | KPTIENNTKKVTVE | | | LLEERDINKFEV | | | |
| | KEEDYNNVFETPKL | | | QKEFINRNLVDT | | | |
| | VEDIKQYRDYKFSH | | | RYATRELTSYLK | | | |
| | RVDKKPNRQLINDT | | | AYFSANNMDVK | | | |
| | LYSTRMKDEHDYI | | | VKTINGSFTNHL | | | |
| | VQTITDIYGKDNTN | | | RKVWRFDKYRN | | | |
| | LKKQFNKNPEKFL | | | HGYKHHAEDAL | | | |
| | MYQNDPKTFEKLSI | | | IIANADFLFKEN | | | |
| | IMKQYSDEKNPLA | | | KKLQNTNKILEK | | | |
| | KYYEETGEYLTKY | | | PTIENNTKKVTV | | | |
| | SKKNNGPIVKKIKL | | | EKEEDYNNVFE | | | |
| | LGNKVGNHLDVTN | | | TPKLVEDIKQYR | | | |
| | KYENSTKKLVKLSI | | | DYKFSHRVDKK | | | |
| | KNYRFDVYLTEKG | | | PNRQLINDTLYS | | | |
| | YKFVTIAYLNVFKK | | | TRMKDEHDYIV | | | |
| | DNYYYIPKDKYQE | | | QTITDIYGKDNT | | | |
| | LKEKKKIKDTDQFI | | | NLKKQFNKNPE | | | |
| | ASFYKNDLIKLNGD | | | KFLMYQNDPKT | | | |
| | LYKIIGVNSDDRNII | | | FEKLSIIMKQYS | | | |
| | ELDYYDIKYKDYC | | | DEKNPLAKYYE | | | |
| | EINNIKGEPRIKKTI | | | ETGEYLTKYSK | | | |
| | GKKTESIEKFTTDV | | | KNNGPIVKKIKL | | | |
| | LGNLYLHSTEKAPQ | | | LGNKVGNHLDV | | | |
| | LIFKRGL | | | TNKYENSTKKL | | | |
| | | | | VKLSIKNYRFDV | | | |
| | | | | YLTEKGYKFVTI | | | |
| | | | | AYLNVFKKDNY | | | |
| | | | | YYIPKDKYQELK | | | |
| | | | | EKKKIKDTDQFI | | | |
| | | | | ASFYKNDLIKLN | | | |
| | | | | GDLYKIIGVNSD | | | |
| | | | | DRNIIELDYYDI | | | |
| | | | | KYKDYCEINNIK | | | |
| | | | | GEPRIKKTIGKK | | | |
| | | | | TESIEKFTTDVL | | | |
| | | | | GNLYLHSTEKAP | | | |
| | | | | QLIFKRGL | | | |
| 8687 | DKKYSIGLDIGTNS | H840A | 8695 | DKKYSIGLDIGT | SpG | NA | NGN |
| | VGWAVITDEYKVP | | | NSVGWAVITDE | | | |
| | SKKFKVLGNTDRH | | | YKVPSKKFKVL | | | |
| | SIKKNLIGALLFDSG | | | GNTDRHSIKKNL | | | |
| | ETAEATRLKRTARR | | | IGALLFDSGETA | | | |
| | RYTRRKNRICYLQE | | | EATRLKRTARR | | | |
| | IFSNEMAKVDDSFF | | | RYTRRKNRICYL | | | |
| | HRLEESFLVEEDKK | | | QEIFSNEMAKVD | | | |
| | HERHPIFGNIVDEV | | | DSFFHRLEESFL | | | |
| | AYHEKYPTIYHLRK | | | VEEDKKHERHPI | | | |
| | KLVDSTDKADLRLI | | | FGNIVDEVAYHE | | | |
| | YLALAHMIKFRGH | | | KYPTIYHLRKKL | | | |
| | FLIEGDLNPDNSDV | | | VDSTDKADLRLI | | | |
| | DKLFIQLVQTYNQL | | | YLALAHMIKFR | | | |
| | FEENPINASGVDAK | | | GHFLIEGDLNPD | | | |
| | AILSARLSKSRRLE | | | NSDVDKLFIQLV | | | |
| | NLIAQLPGEKKNGL | | | QTYNQLFEENPI | | | |
| | FGNLIALSLGLTPNF | | | NASGVDAKAILS | | | |
| | KSNFDLAEDAKLQ | | | ARLSKSRRLENL | | | |
| | LSKDTYDDDLDNL | | | IAQLPGEKKNGL | | | |
| | LAQIGDQYADLFLA | | | FGNLIALSLGLT | | | |
| | AKNLSDAILLSDILR | | | PNFKSNFDLAED | | | |
| | VNTEITKAPLSASM | | | AKLQLSKDTYD | | | |
| | IKRYDEHHQDLTLL | | | DDLDNLLAQIG | | | |
| | KALVRQQLPEKYK | | | DQYADLFLAAK | | | |
| | EIFFDQSKNGYAGY | | | NLSDAILLSDILR | | | |
| | IDGGASQEEFYKFI | | | VNTEITKAPLSA | | | |
| | KPILEKMDGTEELL | | | SMIKRYDEHHQ | | | |
| | VKLNREDLLRKQR | | | DLTLLKALVRQ | | | |
| | TFDNGSIPHQIHLGE | | | QLPEKYKEIFFD | | | |
| | LHAILRRQEDFYPF | | | QSKNGYAGYID | | | |
| | LKDNREKIEKILTFR | | | GGASQEEFYKFI | | | |
| | IPYYVGPLARGNSR | | | KPILEKMDGTEE | | | |
| | FAWMTRKSEETITP | | | LLVKLNREDLLR | | | |
| | WNFEEVVDKGASA | | | KQRTFDNGSIPH | | | |
| | QSFIERMTNFDKNL | | | QIHLGELHAILR | | | |
| | PNEKVLPKHSLLYE | | | RQEDFYPFLKDN | | | |
| | YFTVYNELTKVKY | | | REKIEKILTFRIP | | | |
| | VTEGMRKPAFLSG | | | YYVGPLARGNS | | | |
| | EQKKAIVDLLFKTN | | | RFAWMTRKSEE | | | |
| | RKVTVKQLKEDYF | | | TITPWNFEEVVD | | | |
| | KKIECFDSVEISGVE | | | KGASAQSFIERM | | | |
| | DRFNASLGTYHDL | | | TNFDKNLPNEK | | | |
| | LKIIKDKDFLDNEE | | | VLPKHSLLYEYF | | | |
| | NEDILEDIVLTLTLF | | | TVYNELTKVKY | | | |
| | EDREMIEERLKTYA | | | VTEGMRKPAFL | | | |
| | HLFDDKVMKQLKR | | | SGEQKKAIVDLL | | | |
| | RRYTGWGRLSRKLI | | | FKTNRKVTVKQ | | | |
| | NGIRDKQSGKTILD | | | LKEDYFKKIECF | | | |
| | FLKSDGFANRNFM | | | DSVEISGVEDRF | | | |
| | QLIHDDSLTFKEDI | | | NASLGTYHDLL | | | |
| | QKAQVSGQGDSLH | | | KIIKDKDFLDNE | | | |
| | EHIANLAGSPAIKK | | | ENEDILEDIVLTL | | | |
| | GILQTVKVVDELV | | | TLFEDREMIEER | | | |
| | KVMGRHKPENIVIE | | | LKTYAHLFDDK | | | |
| | MARENQTTQKGQK | | | VMKQLKRRRYT | | | |
| | NSRERMKRIEEGIK | | | GWGRLSRKLIN | | | |
| | ELGSQILKEHPVEN | | | GIRDKQSGKTIL | | | |
| | TQLQNEKLYLYYL | | | DFLKSDGFANR | | | |
| | QNGRDMYVDQEL | | | NFMQLIHDDSLT | | | |
| | DINRLSDYDVDHIV | | | FKEDIQKAQVSG | | | |
| | PQSFLKDDSIDNKV | | | QGDSLHEHIANL | | | |
| | LTRSDKNRGKSDN | | | AGSPAIKKGILQ | | | |
| | VPSEEVVKKMKNY | | | TVKVVDELVKV | | | |
| | WRQLLNAKLITQR | | | MGRHKPENIVIE | | | |
| | KFDNLTKAERGGL | | | MARENQTTQKG | | | |
| | SELDKAGFIKRQLV | | | QKNSRERMKRIE | | | |
| | ETRQITKHVAQILD | | | EGIKELGSQILKE | | | |
| | SRMNTKYDENDKL | | | HPVENTQLQNE | | | |
| | IREVKVITLKSKLVS | | | KLYLYYLQNGR | | | |
| | DFRKDFQFYKVREI | | | DMYVDQELDIN | | | |
| | NNYHHAHDAYLN | | | RLSDYDVDAIVP | | | |
| | AVVGTALIKKYPKL | | | QSFLKDDSIDNK | | | |
| | ESEFVYGDYKVYD | | | VLTRSDKNRGK | | | |
| | VRKMIAKSEQEIGK | | | SDNVPSEEVVK | | | |
| | ATAKYFFYSNIMNF | | | KMKNYWRQLL | | | |
| | FKTEITLANGEIRKR | | | NAKLITQRKFDN | | | |
| | PLIETNGETGEIVW | | | LTKAERGGLSEL | | | |
| | DKGRDFATVRKVL | | | DKAGFIKRQLVE | | | |
| | SMPQVNIVKKTEV | | | TRQITKHVAQIL | | | |
| | QTGGFSKESILPKR | | | DSRMNTKYDEN | | | |
| | NSDKLIARKKDWD | | | DKLIREVKVITL | | | |
| | PKKYGGFLWPTVA | | | KSKLVSDFRKDF | | | |
| | YSVLVVAKVEKGK | | | QFYKVREINNY | | | |
| | SKKLKSVKELLGITI | | | HHAHDAYLNAV | | | |
| | MERSSFEKNPIDFL | | | VGTALIKKYPKL | | | |
| | EAKGYKEVKKDLII | | | ESEFVYGDYKV | | | |
| | KLPKYSLFELENGR | | | YDVRKMIAKSE | | | |
| | KRMLASAKQLQKG | | | QEIGKATAKYFF | | | |
| | NELALPSKYVNFLY | | | YSNIMNFFKTEI | | | |
| | LASHYEKLKGSPED | | | TLANGEIRKRPLI | | | |
| | NEQKQLFVEQHKH | | | ETNGETGEIVW | | | |
| | YLDEIIEQISEFSKR | | | DKGRDFATVRK | | | |
| | VILADANLDKVLSA | | | VLSMPQVNIVK | | | |
| | YNKHRDKPIREQAE | | | KTEVQTGGFSKE | | | |
| | NIIHLFTLTNLGAPA | | | SILPKRNSDKLIA | | | |
| | AFKYFDTTIDRKQY | | | RKKDWDPKKY | | | |
| | RSTKEVLDATLIHQ | | | GGFLWPTVAYS | | | |
| | SITGLYETRIDLSQL | | | VLVVAKVEKGK | | | |
| | GGD | | | SKKLKSVKELLG | | | |
| | | | | ITIMERSSFEKNP | | | |
| | | | | IDFLEAKGYKEV | | | |
| | | | | KKDLIIKLPKYS | | | |
| | | | | LFELENGRKRM | | | |
| | | | | LASAKQLQKGN | | | |
| | | | | ELALPSKYVNFL | | | |
| | | | | YLASHYEKLKG | | | |
| | | | | SPEDNEQKQLFV | | | |
| | | | | EQHKHYLDEIIE | | | |
| | | | | QISEFSKRVILAD | | | |
| | | | | ANLDKVLSAYN | | | |
| | | | | KHRDKPIREQAE | | | |
| | | | | NIIHLFTLTNLGA | | | |
| | | | | PAAFKYFDTTID | | | |
| | | | | RKQYRSTKEVL | | | |
| | | | | DATLIHQSITGL | | | |
| | | | | YETRIDLSQLGG | | | |
| | | | | D | | | |

### Flap Endonuclease

[0295] In some embodiments, a split prime editor further comprises additional polypeptide components, for example, a flap endonuclease (FEN, e.g., FEN1). In some embodiments, the flap endonuclease excises the 5′ single stranded DNA of the edit strand of the target gene and assists incorporation of the intended nucleotide edit into the target gene. In some embodiments, the FEN is linked or fused to another component. In some embodiments, the FEN is provided in trans, for example, as a separate polypeptide or polynucleotide encoding the FEN. In some embodiments, a split prime editor or prime editing composition comprises a flap nuclease. In some embodiments, the flap nuclease is a FEN1, or any FEN1 functional variant, functional mutant, or functional fragment thereof. In some embodiments, the flap nuclease is a TREX2, EXO1, or any other flap nuclease known in the art, or any functional variant, functional mutant, or functional fragment thereof. In some embodiments, the flap nuclease has amino acid sequence that is at least about 70% identical, at least about 80% identical, at least about 90% identical, at least about 95% identical, at least about 96% identical, at least about 97% identical, at least about 98% identical, at least about 99% identical, at least about 99.5% identical, or at least about 99.9% identical to any of the flap nucleases described herein or known in the art.

### Nuclear Localization Sequences

[0296] In some embodiments, a split prime editor further comprises one or more nuclear localization sequence (NLS). In some embodiments, the NLS helps promote translocation of a protein into the cell nucleus. In some embodiments, a split prime editor comprises a DNA binding domain and a DNA polymerase that comprises one or more NLSs. In some embodiments, the split prime editor comprises a first polypeptide comprising a first amino acid sequence and a second polypeptide comprising a second amino acid sequence. In some embodiments, one or more polypeptides of the split prime editor are fused to or linked to one or more NLSs. In some embodiments, the split prime editor comprises a first amino acid sequence and a second amino acid sequence that are provided in trans, wherein the first amino acid sequence and/or the second amino acid sequence is fused or linked to one or more NLSs.

[0297] In some embodiments, the first polypeptide comprises at least one NLS. In some embodiments, the second polypeptide comprises at least one NLS. In some embodiments, the at least one NLS comprises an amino acid sequence as set forth in Table 3.

[0298] In certain embodiments, a split prime editor or prime editing complex comprises at least one NLS. In some embodiments, a split prime editor or prime editing complex comprises at least two NLSs. In embodiments with at least two NLSs, the NLSs can be the same NLS, or they can be different NLSs.

[0299] In some instances, a split prime editor may further comprise at least one nuclear localization sequence (NLS). In some cases, a split prime editor may further comprise 1 NLS. In some cases, a split prime editor may further comprise 2 NLSs. In other cases, a split prime editor may further comprise 3 NLSs. In one case, a primer editor may further comprise more than 4, 5, 6, 7, 8, 9 or 10 NLSs.

[0300] In addition, the NLSs may be expressed as part of a split prime editor complex. In some embodiments, a NLS can be positioned almost anywhere in a protein's amino acid sequence, and generally comprises a short sequence of three or more or four or more amino acids. The location of the NLS fusion can be at the N-terminus, the C-terminus, or positioned anywhere within the sequence(s) of a split prime editor or a component thereof (e.g., inserted between the DNA-binding domain and the DNA polymerase domain of a split prime editor, between the DNA binding domain and a linker sequence, between a DNA polymerase and a linker sequence, between two linker sequences of a split prime editor or a component thereof, in either N-terminus to C-terminus or C-terminus to N-terminus order). In some embodiments, a split prime editor is a protein that comprises an NLS at the N terminus. In some embodiments, a split prime editor is a protein that comprises an NLS at the C terminus. In some embodiments, a split prime editor is a protein that comprises at least one NLS at both the N terminus and the C terminus. In some embodiments, the split prime editor is a protein that comprises two NLSs at the N terminus and/or the C terminus.

[0301] Any NLSs that are known in the art are also contemplated herein. The NLSs may be any naturally occurring NLS, or any non-naturally occurring NLS (e.g., an NLS with one or more mutations relative to a wild-type NLS). In some embodiments, the one or more NLSs of a split prime editor comprise bipartite NLSs. In some embodiments, a nuclear localization signal (NLS) is predominantly basic. In some embodiments, the one or more NLSs of a split prime editor are rich in lysine and arginine residues. In some embodiments, the one or more NLSs of a split prime editor comprise proline residues. In some embodiments, a nuclear localization signal (NLS) comprises the sequence MDSLLMNRRKFLYQFKNVRWAKGRRETYLC (SEQ ID NO: 8696), KRTADGSEFESPKKKRKV (SEQ ID NO: 8697), KRTADGSEFEPKKKRKV (SEQ ID NO: 8698), NLSKRPAAIKKAGQAKKKK (SEQ ID NO: 8699), RQRRNELKRSF (SEQ ID NO: 8700), or NQSSNFGPMKGGNFGGRSSGPYGGGGQYFAKPRNQGGY (SEQ ID NO: 8701).

[0302] In some embodiments, a NLS is a monopartite NLS. For example, in some embodiments, a NLS is a SV40 large T antigen NLS PKKKRKV (SEQ ID NO: 8702). In some embodiments, a NLS is a bipartite NLS. In some embodiments, a bipartite NLS comprises two basic domains separated by a spacer sequence comprising a variable number of amino acids. In some embodiments, a NLS is a bipartite NLS. In some embodiments, a bipartite NLS consists of two basic domains separated by a spacer sequence comprising a variable number of amino acids. In some embodiments, the spacer amino acid sequence comprises the Xenopus nucleoplasmin sequence KRXXXXXXXXXXKKKL (SEQ ID NO: 4451) wherein X is any amino acid. In some embodiments, a NLS is a noncanonical sequences such as M9 of the hnRNP A1 protein, the influenza virus nucleoprotein NLS, and the yeast Gal4 protein NLS.

[0303] Other non-limiting examples of NLS sequences are provided in Table 3 below. In some embodiments, the first polypeptide comprises a NLS sequence (e.g., and NLS sequence disclosed in Table 3). In some embodiments, the second polypeptide comprises a NLS sequence (e.g., and NLS sequence disclosed in Table 3). The NLS sequence may comprise any one of the sequences disclosed in table 3.

TABLE 3
Exemplary nuclear localization sequences

| | SEQ | |
|---|---|---|
| | ID | |
| Description | NO: | Sequence |
| NLS of SV40 | 8702 | PKKKRKV |
| Large T-AG | | |
| NLS | 8703 | MKRTADGSEFESPKKKRKV |
| NLS | 8697 | KRTADGSEFESPKKKRKV |
| NLS | 8696 | MDSLLMNRRKFLYQFKNVRWAKGRR |
| | | ETYLC |
| NLS of | 8704 | AVKRPAATKKAGQAKKKKLD |
| Nucleoplasmin | | |
| NLS of EGL-13 | 8705 | MSRRRKANPTKLSENAKKLAKEVEN |
| NLS of C-Myc | 8706 | PAAKRVKLD |
| NLS of Tus- | 8707 | KLKIKRPVK |
| protein | | |
| NLS of polyoma | 8708 | VSRKRPRP |
| large T-AG | | |
| NLS of Hepatitis | 8709 | EGAPPAKRAR |
| D virus antigen | | |
| NLS of murine p53 | 8710 | PPQPKKKPLDGE |
| Linker + NLS | 8711 | SGGSKRTADGSEFEPKKKRKV |

### Additional Split Prime Editor Components

[0304] A split prime editor described herein may comprise additional functional domains, for example, one or more domains that modify the folding, solubility, or charge of the split prime editor. In some instances, the split prime editor may comprise a solubility-enhancement (SET) domain.

[0305] In some embodiments, a split prime editor comprises one or more epitope tags. Non-limiting examples of epitope tags include histidine (His) tags, V5 tags, FLAG tags, influenza hemagglutinin (HA) tags, Myc tags, VSV-G tags, thioredoxin (Trx) tags, biotin carboxylase carrier protein (BCCP) tags, myc-tags, calmodulin-tags, polyhistidine tags, also referred to as histidine tags or His-tags, maltose binding protein (MBP)-tags, nus-tags, glutathione-S-transferase (GST)-tags, green fluorescent protein (GFP)-tags, thioredoxin-tags, S-tags, Softags (e.g., Softag 1, Softag 3), strep-tags, biotin ligasc tags, FlAsH tags, V5 tags, and SBP-tags. Additional suitable sequences will be apparent to those of skill in the art. In some embodiments, the fusion protein comprises one or more His tags.

[0306] In some embodiments, a split prime editor comprises one or more polypeptide domains encoded by one or more reporter genes. Examples of reporter genes include, but are not limited to, glutathione-5-transferase (GST), horseradish peroxidase (HRP), chloramphenicol acetyltransferase (CAT), beta-galactosidase, beta-glucuronidase, luciferase, green fluorescent protein (GFP), HcRed, DsRed, cyan fluorescent protein (CFP), yellow fluorescent protein (YFP), and autofluorescent proteins including blue fluorescent protein (BFP).

[0307] In some embodiments, a split prime editor comprises one or more polypeptide domains that binds DNA molecules or binds other cellular molecules. Examples of binding proteins or domains include, but are not limited to, maltose binding protein (MBP), S-tag, Lex A DNA binding domain (DBD) fusions, GAL4 DNA binding domain fusions, and herpes simplex virus (HSV) BP16 protein fusions.

[0308] In some embodiments, a split prime editor comprises a protein domain that is capable of modifying the intracellular half-life of the split prime editor.

[0309] In some embodiments, a prime editing complex comprises at least two polypeptides comprising a DNA binding domain (e.g., Cas9 (H840A)) and a reverse transcriptase (e.g., a variant MMLV RT) having the following structure: [NLS]-[Cas9 (H840A)]-[linker]-[MMLV_RT (D200N) (T330P) (L603W) (T306K) (W313F)], and a desired PEgRNA.

[0310] Polypeptides comprising components of a split prime editor may be fused via peptide linkers, or may be provided in trans relevant to each other. For example, a reverse transcriptase may be expressed, delivered, or otherwise provided as an individual component rather than as a part of a protein with the DNA binding domain. In such cases, components of the split prime editor may be associated through non-peptide linkages or co-localization functions. In some embodiments, a split prime editor further comprises additional components capable of interacting with, associating with, or capable of recruiting other components of the split prime editor or the prime editing system. For example, a split prime editor may comprise an RNA-protein recruitment polypeptide that can associate with an RNA-protein recruitment RNA aptamer. In some embodiments, an RNA-protein recruitment polypeptide can recruit, or be recruited by, a specific RNA sequence. Non limiting examples of RNA-protein recruitment polypeptide and RNA aptamer pairs include a MS2 coat protein and a MS2 RNA hairpin, a PCP polypeptide and a PP7 RNA hairpin, a Com polypeptide and a Com RNA hairpin, a Ku protein and a telomerase Ku binding RNA motif, and a Sm7 protein and a telomerase Sm7 binding RNA motif. In some embodiments, the split prime editor comprises a DNA binding domain fused or linked to an RNA-protein recruitment polypeptide. In some embodiments, the split prime editor comprises a DNA polymerase domain fused or linked to an RNA-protein recruitment polypeptide. In some embodiments, the DNA binding domain and the DNA polymerase domain fused to the RNA-protein recruitment polypeptide, or the DNA binding domain fused to the RNA-protein recruitment polypeptide and the DNA polymerase domain are co-localized by the corresponding RNA-protein recruitment RNA aptamer of the RNA-protein recruitment polypeptide. In some embodiments, the corresponding RNA-protein recruitment RNA aptamer fused or linked to a portion of the PERNA or ngRNA. For example, an MS2 coat protein fused or linked to the DNA polymerase and a MS2 hairpin installed on the PEgRNA for co-localization of the DNA polymerase and the RNA-guided DNA binding domain (e.g., a Cas9 nickase).

[0311] In some embodiments, a split prime editor comprises a polypeptide domain, an MS2 coat protein (MCP), that recognizes an MS2 hairpin. In some embodiments, the nucleotide sequence of the MS2 hairpin (or equivalently referred to as the “MS2 aptamer”) is: GCCAACATGAGGATCACCCATGTCTGCAGGGCC (SEQ ID NO: 4446). In some embodiments, the amino acid sequence of the MCP is:

(SEQ ID NO: 4447)
GSASNFTQFVLVDNGGTGDVTVAPSNFANGVAEWISSNSRSQAYKVTC
SVRQSSAQNRKYTIKVEVPKVATQTVGGEELPVAGWRSYLNMELTIPI
FATNSDCELIVKAMQGLLKDGNPIPSAIA ANSGIY.

[0312] In certain embodiments, components of a split prime editor are directly fused to each other. In certain embodiments, components of a split prime editor are associated to each other via a linker.

[0313] As used herein, a linker can be any chemical group or a molecule linking two molecules or moieties, e.g., a DNA binding domain and a polymerase domain of a split prime editor. In some embodiments, a linker is an organic molecule, group, polymer, or chemical moiety. In some embodiments, the linker comprises a non-peptide moiety. The linker may be as simple as a covalent bond, or it may be a polymeric linker many atoms in length, for example, a polynucleotide sequence. In certain embodiments, the linker is a covalent bond (e.g., a carbon-carbon bond, disulfide bond, carbon-heteroatom bond, etc.).

[0314] In some embodiments, the second polypeptide further comprises at least one (e.g., 1, 2, 3, 4, 5, 6, 7, 8, 9, or 10) peptide linker(s). In some embodiments, the first polypeptide further comprises at least one (e.g., 1, 2, 3, 4, 5, 6, 7, 8, 9, or 10) peptide linker(s).

[0315] In certain embodiments, two or more components of a split prime editor are linked to each other by a peptide linker. In some embodiments, a peptide linker is 5-100 amino acids in length, for example, 2, 3, 4, 5, 6, 7, 8, 9, 10, 11, 12, 13, 14, 15, 16, 17, 18, 19, 20, 21, 22, 23, 24, 25, 26, 27, 28, 29, 30, 30-35, 35-40, 40-45, 45-50, 50-60, 60-70, 70-80, 80-90, 90-100, 100-150, or 150-200 amino acids in length. In some embodiments, the at least one peptide linker comprises 1 to 100 amino acids, for example, the peptide linker may be from 5 to 25 amino acids in length. In some embodiments, the peptide linker is 16 amino acids in length, 24 amino acids in length, 64 amino acids in length, or 96 amino acids in length.

[0316] In some embodiments, the linker comprises the amino acid sequence (GGGGS)n (SEQ ID NO: 8712), (G)n (SEQ ID NO: 8713), (EAAAK)n (SEQ ID NO: 8714), (GGS)n (SEQ ID NO: 8715), (SGGS)n (SEQ ID NO: 8716), (XP)n (SEQ ID NO: 8717), or any combination thereof, wherein n is independently an integer between 1 and 30, and wherein X is any amino acid. In some embodiments, the linker comprises the amino acid sequence (GGS)n (SEQ ID NO: 8718), wherein n is 1, 3, or 7. In some embodiments, the linker comprises the amino acid sequence SGSETPGTSESATPES (SEQ ID NO: 8719). In some embodiments, the linker comprises the amino acid sequence SGGSSGGSSGS ETPGTSESATPESSGGSSGGS (SEQ ID NO: 8720). In some embodiments, the linker comprises the amino acid sequence SGGSGGSGGS (SEQ ID NO: 8721). In some embodiments, the linker comprises the amino acid sequence SGGS (SEQ ID NO: 8722). In other embodiments, the linker comprises the amino acid sequence SGGSSGGSSGSETPGTSESATPESAGSYPYDVPDYAGSAAPAAKKKKLDGSGSGGSSGG S (SEQ ID NO: 8723).

[0317] In some embodiments, a linker comprises 1-100 amino acids. In some embodiments, the linker comprises the amino acid sequence SGSETPGTSESATPES (SEQ ID NO: 8719). In some embodiments, the linker comprises the amino acid sequence SGGSSGGSSGSETPGTSESATPESSGGSSGGS (SEQ ID NO: 8720). In some embodiments, the linker comprises the amino acid sequence SGGSGGSGGS (SEQ ID NO: 8721). In some embodiments, the linker comprises the amino acid sequence SGGS (SEQ ID NO: 8722). In some embodiments, the linker comprises the amino acid sequence GGSGGS (SEQ ID NO: 8724), (GGSGGSGGS (SEQ ID NO: 8725), SGGSSGGSSGSETPGTSESATPESAGSYPYDVPDYAGSAAPAAKKKKLDGSGSGGSSGGS (SEQ ID NO: 8723), or SGGSSGGSSGSETPGTSESATPESSGGSSGGSS (SEQ ID NO: 8726).

[0318] In some embodiments, the at least one peptide linker comprises an amino acid sequence as set forth in Table 15. In some embodiments, the peptide linker may have a secondary structure motif including, but not limited to, a residue isolated B-bridge (referred to as “B” in Table 15), an extended strand (referred to as “E” in Table 15), a 3-helix (referred to as “G” in Table 15), an alpha helix (referred to as “H” in Table 15), a 5-helix (referred to as “I” in Table 15), a hydrogen bonded turn (referred to as “T” in Table 15), a bend (referred to as “S” in Table 15), and/or a coil (referred to as “C” in Table 15). The term “NA” as used in Table 15 refers to “not analyzed.”

TABLE 15
Exemplary peptide linker sequences

| SEQ | | | | | |
|---|---|---|---|---|---|
| ID | | | | | Secondary |
| NO: | Sequence | Length | Name | Type | Structure |
| 8727 | AEAAKEAAKEAAKEAAKALE | 38 | ALEA | Structured | NA |
| | AEAAKEAAKEAAKEAAKA | | | | |
| 8728 | AEAAKEAAKEAAKEAAKALE | 76 | ALEA2 | Structured | NA |
| | AEAAKEAAKEAAKEAAKAAE | | | | |
| | AAKEAAKEAAKEAAKALEAE | | | | |
| | AAKEAAKEAAKEAAKA | | | | |
| 8729 | AGGSQYKLILNGKTLKGETTT | 63 | Basic_ | Structured | NA |
| | EAVNAATAEKVFKQYANRNG | | GB1 | | |
| | VDGKWTYDDATKTFTVTEGG | | | | |
| | SA | | | | |
| 8730 | KLSGGGGSGGGGSGGGGSAE | 141 | cTPR3 | Structured | NA |
| | AWYNLGNAYYKQGDYQKAIE | | | | |
| | YYQKALELDPNNAEAWYNLG | | | | |
| | NAYYKQGDYQKAIEYYQKAL | | | | |
| | ELDPNNAEAWYNLGNAYYKQ | | | | |
| | GDYQKAIEDYQKALELDPNNL | | | | |
| | QRSAGGGGSGGGGSGGGGAS | | | | |
| 8731 | AGGSQYKLILNGKTLKGETTT | 63 | GB1 | Structured | NA |
| | EAVDAATAEKVFKQYANDNG | | | | |
| | VDGEWTYDDATKTFTVTEGG | | | | |
| | SA | | | | |
| 8732 | AGSGNSSGSGGSGGSGNSSGS | 46 | GcGcP | Unstructured | NA |
| | GGSPVPSTPPTPSPSTPPTPSPS | | | | |
| | AS | | | | |
| 8733 | AGGSSGGSSGGSSGGSSGGSS | 47 | GGSS11 | Unstructured | NA |
| | GGSSGGSSGGSSGGSSGGSSG | | | | |
| | GSSAS | | | | |
| 8734 | AGGSSGGSSGGSSGGSSGGSS | 39 | GGSS9 | Unstructured | NA |
| | GGSSGGSSGGSSGGSSAS | | | | |
| 8735 | AGSGGSGGSGGSPVPSTPPTPS | 144 | GPbG | Unstructured | NA |
| | PSTPPTPSPSIQRTPKIQVYSRH | | | | |
| | PAENGKSNFLNCYVSGFHPSDI | | | | |
| | EVDLLKNGERIEKVEHSDLSFS | | | | |
| | KDWSFYLLYYTEFTPTEKDEY | | | | |
| | ACRVNHVTLSQPKIVKWDRD | | | | |
| | GGSGGSGGSGGSAS | | | | |
| 8736 | AGSGGSGGSGGSPVPSTPPTPS | 152 | GPbP | Unstructured | NA |
| | PSTPPTPSPSIQRTPKIQVYSRH | | | | |
| | PAENGKSNFLNCYVSGFHPSDI | | | | |
| | EVDLLKNGERIEKVEHSDLSFS | | | | |
| | KDWSFYLLYYTEFTPTEKDEY | | | | |
| | ACRVNHVTLSQPKIVKWDRDP | | | | |
| | VPSTPPTPSPSTPPTPSPSAS | | | | |
| 8737 | AGSGGSGGSGGSPVPSTPPTNS | 74 | GpCpCpC | Unstructured | NA |
| | SSTPPTPSPSPVPSTPPTNSSSTP | | | | |
| | PTPSPSPVPSTPPTNSSSTPPTPS | | | | |
| | PSAS | | | | |
| 8738 | AGSGGSGGSGGSPVPSTPPTPS | 66 | GPGcP | Unstructured | NA |
| | PSTPPTPSPSGGSGNSSGSGGSP | | | | |
| | VPSTPPTPSPSTPPTPSPSAS | | | | |
| 8739 | AGSGGSGGSGGSPVPSTPPTPS | 74 | GPPcP | Unstructured | NA |
| | PSTPPTPSPSPVPSTPPTNSSSTP | | | | |
| | PTPSPSPVPSTPPTPSPSTPPTPS | | | | |
| | PSAS | | | | |
| 8740 | AGSGGSGGSGGSPVPSTPPTPS | 74 | GPPP | Unstructured | NA |
| | PSTPPTPSPSPVPSTPPTPSPSTP | | | | |
| | PTPSPSPVPSTPPTPSPSTPPTPS | | | | |
| | PSAS | | | | |
| 8741 | AGSGGSGGSGGSPVPSTPPTPS | 121 | GPUG | Unstructured | NA |
| | PSTPPTPSPSQIFVKTLTGKTITL | | | | |
| | EVEPSDTIENVKAKIQDKEGIP | | | | |
| | PDQQRLIFAGKQLEDGRTLSD | | | | |
| | YNIQKESTLHLVLRLRGGGGS | | | | |
| | GGSGGSGGSAS | | | | |
| 8742 | AGGGSGGGGSGGGGSGGGGS | 52 | GS11 | Unstructured | NA |
| | GGGGSGGGGSGGGGSGGGGS | | | | |
| | GGGGSGGGGSAS | | | | |
| 8743 | AGGGGSGGGGSGGGGSGGGG | 33 | GS6 | Unstructured | NA |
| | SGGGGSGGGGSAS | | | | |
| 8744 | AGGGSGGGGSGGGGSGGGGS | 37 | GS7 | Unstructured | NA |
| | GGGGSGGGGSGGGGSAS | | | | |
| 8745 | AGGGSGGGGSGGGGSGGGGS | 42 | GS8 | Unstructured | NA |
| | GGGGSGGGGSGGGGSGGGGS | | | | |
| | AS | | | | |
| 8746 | AGGGSGGGGSGGGGSGGGGS | 47 | GS9 | Unstructured | NA |
| | GGGGSGGGGSGGGGSGGGGS | | | | |
| | GGGGSAS | | | | |
| 8747 | AGGSSGGSSGGSSGGSSGGSS | 31 | GSS7 | Unstructured | NA |
| | GGSSGGSSAS | | | | |
| 8748 | AGSQMALHANVTGAMNYTW | 36 | Nat1 | Natural | CCHHHHHH |
| | ATCTINTHAPRSMLGSA | | | | HHHHHSSSS |
| | | | | | SSSTTCTTTT |
| | | | | | TSTTTSSSS |
| 8749 | GRMANFDGMDMSHKMALSST | 43 | Nat10 | Natural | SSTTCSSSCC |
| | NEIETNEGLAGTSLDVMDLSR | | | | CCCCCSSCT |
| | VL | | | | TCCCCCCTT |
| | | | | | TTSCSSCTTS |
| | | | | | HHHHH |
| 8750 | SAAAATPAVRTVPQYKYAAG | 49 | Nat11 | Natural | CCSCCSSCC |
| | VRNPQQHLNAQPQVTMQQPA | | | | CSCSSCCSSC |
| | VHVQGQEPL | | | | CCSSTTTTC |
| | | | | | CCCSCCCCC |
| | | | | | CCCSCTTCC |
| | | | | | CCC |
| 8751 | VSGITGMVDPSRINVANLAEE | 50 | Nat12 | Natural | EEEEESCCC |
| | GLGNIRANSFGYDSAAIKLRIH | | | | GGGEEEEEE |
| | KLSKTLD | | | | CCTTCCSCC |
| | | | | | CCCCSSSEE |
| | | | | | EEEECCTTT |
| | | | | | CSSSC |
| 8752 | ILTHDSSIRYLQEIYNSNNQKIV | 51 | Nat13 | Natural | TTTGGGGTS |
| | NLKEKVAQLEAQCQEPCKDT | | | | GGGHHHHH |
| | VQIHDITG | | | | HHHHHHHH |
| | | | | | HHHHHHHH |
| | | | | | HHSCSCCCC |
| | | | | | SCCCEEEEE |
| 8753 | KRSVKNPYPISFLLSDLINRRT | 57 | Nat14 | Natural | EEEECCSSCS |
| | QRVDGQPMIGMSSQVEEVRV | | | | CSSSCCCSSC |
| | YEDTEELPGDPDMIR | | | | CCCCCCSSC |
| | | | | | CSGGGCCCC |
| | | | | | CCCCCCSCC |
| | | | | | SCCSCTTCE |
| | | | | | E |
| 8754 | CYGKKYGPKGKGKGMGAGTL | 58 | Nat15 | Natural | HHHHHHCC |
| | STDKGESLGIKYEEGQSHRPTN | | | | CCCCCCCCC |
| | PNASRMAQKVGGSDGC | | | | CCCCCCCCC |
| | | | | | CCCCCCCCC |
| | | | | | CCCCCCCCC |
| | | | | | CCCCCCCCC |
| | | | | | CCEEC |
| 8755 | VPSERGLQRRRFVQNALNG | 19 | Nat16 | Natural | CCCTTTTCS |
| | | | | | SSSSSCCCCT |
| 8756 | LLAPTRIYVKSVLEL | 15 | Nat17 | Natural | SSHHSSSSSS |
| | | | | | SSHHH |
| 8757 | VSPVASFNTLQLGERGNIV | 19 | Nat18 | Natural | SSSCCCSSSC |
| | | | | | CCCTTTTSS |
| 8758 | TEEPGAPLTTPPTLHGNQARA | 21 | Nat19 | Natural | TSCTTSCSC |
| | | | | | CCCCCCTTS |
| | | | | | CCH |
| 8759 | GYETIPLALPAFFPAPDNRGVE | 34 | Nat2 | Natural | CGGGSCCCC |
| | APYRKEQRLGSA | | | | CCCCCCGG |
| | | | | | GTTTTHHHH |
| | | | | | HHHHH |
| 8760 | DVHNFSIKDVGTIITNKTGVSP | 22 | Nat20 | Natural | HHHHHHCC |
| | | | | | CTTCEEEESS |
| | | | | | CCCS |
| 8761 | GECLKCIYNTAGFYCDRCKEG | 21 | Nat21 | Natural | CCBCCBCTT |
| | | | | | EETTTTCEE |
| | | | | | CTT |
| 8762 | QMALHANVTGAMNYTWATC | 30 | Nat22 | Natural | HHHHTCSTT |
| | TINTHAPRSML | | | | SCCCSCCCS |
| | | | | | SHHHHSCCS |
| | | | | | CCH |
| 8763 | PPEATQNVAESTHNLTRNFPA | 25 | Nat23 | Natural | CCCCBCSSS |
| | DLFN | | | | CBCCCCCEE |
| | | | | | CCCCCCC |
| 8764 | AGSVAETLKDNTQSKLTVKGN | 35 | Nat3 | Natural | CCHHHHHH |
| | LDTYGFCDDVWTFI | | | | HHHHHSSSS |
| | | | | | SSTTCTTTTT |
| | | | | | STTTSSSS |
| 8765 | YVREEVFTNNADVVAEKALK | 32 | Nat4 | Natural | ECCCCEECC |
| | PESDITFSKQTA | | | | CCCCCCTTS |
| | | | | | CCCCCCEEC |
| | | | | | CCEEE |
| 8766 | TCHHRSPLSLTPPKCGSCHTKE | 33 | Nat5 | Natural | GTSCSSCCC |
| | IDAADPGRPNL | | | | SSCCCHHHH |
| | | | | | SCSSCCTTST |
| | | | | | TSCCH |
| 8767 | LDTTAENQAKNEHLQKENERL | 34 | Nat6 | Natural | CHHHHHHH |
| | LRDWNDVQGRFEK | | | | HHHHHHHH |
| | | | | | HHHHHHHH |
| | | | | | HHTHHHHH |
| | | | | | HC |
| 8768 | AQAERQRILERTNEGRQEAMA | 34 | Nat7 | Natural | HHHHHHHH |
| | KGVVFGRKRKIDR | | | | HHHHHHHH |
| | | | | | HHHHHHTC |
| | | | | | CCSSCCCSC |
| | | | | | H |
| 8769 | GVTPSTTALPDIVNLSTNYLDK | 35 | Nat8 | Natural | SCCCCCCSS |
| | NTREDRIHSIKDF | | | | SCCCCCCHH |
| | | | | | HHTTTTCCS |
| | | | | | SCCCHHHH |
| 8770 | TKLPEAQQRVGGCFLNLMPQ | 39 | Nat9 | Natural | HTTTCTTCC |
| | MKTLYLTYCANHPSAVNVL | | | | HHHHHHHH |
| | | | | | HHHHHHHH |
| | | | | | HHHHHHHH |
| | | | | | HHHHHH |
| 8726 | SGGSSGGSSGSETPGTSESATP | 33 | PE2 | Unstructured | NA |
| | ESSGGSSGGSS | | | | |
| 8771 | GGSWCIFVYNLSPDSDESVLW | 85 | RNP_1 | Structured | NA |
| | QLFGPFGAVNNVKVIRDENTN | | | | |
| | KCKGFGFVTMTNYDEAAMAI | | | | |
| | ASLNGYRLGDRVLQVSFKTNG | | | | |
| | GS | | | | |
| 8772 | AGSKPFGKSKGFGFVCFSSPDE | 62 | RNP_2 | Structured | NA |
| | ASKAVTEMNQRMVNGKPLYV | | | | |
| | ALAQRKDVRRSQLEASIGSA | | | | |
| 8773 | SGGSSGGSSGS | 11 | | Unstructured | NA |
| 8722 | SGGS | 4 | | Unstructured | NA |
| 8718 | GGS | 3 | | Unstructured | NA |

[0319] In certain embodiments, two or more components of a split prime editor are linked to each other by a non-peptide linker. In some embodiments, the linker is a carbon-nitrogen bond of an amide linkage. In certain embodiments, the linker is a cyclic or acyclic, substituted or unsubstituted, branched or unbranched aliphatic or heteroaliphatic linker. In certain embodiments, the linker is polymeric (e.g., polyethylene, polyethylene glycol, polyamide, polyester, etc.). In certain embodiments, the linker comprises a monomer, dimer, or polymer of aminoalkanoic acid. In certain embodiments, the linker comprises an aminoalkanoic acid (e.g., glycine, ethanoic acid, alanine, beta-alanine, 3-aminopropanoic acid, 4-aminobutanoic acid, 5-pentanoic acid, etc.). In certain embodiments, the linker comprises a monomer, dimer, or polymer of aminohexanoic acid (Ahx). In certain embodiments, the linker is based on a carbocyclic moiety (e.g., cyclopentane, cyclohexane). In other embodiments, the linker comprises a polyethylene glycol moiety (PEG). In certain embodiments, the linker comprises an aryl or heteroaryl moiety. In certain embodiments, the linker is based on a phenyl ring. The linker may include functionalized moieties to facilitate attachment of a nucleophile (e.g., thiol, amino) from the peptide to the linker. Any electrophile may be used as part of the linker. Exemplary electrophiles include, but are not limited to, activated esters, activated amides, Michael acceptors, alkyl halides, aryl halides, acyl halides, and isothiocyanates.

[0320] Components of a split prime editor may be able to join or connect to each other in any order.

[0321] In some embodiments, a split prime editor protein, a polypeptide component of a split prime editor, or a polynucleotide encoding the split prime editor protein or polypeptide component, may be split into an N-terminal half and a C-terminal half or polypeptides that encode the N-terminal half and the C terminal half, and provided to a target DNA in a cell separately. For example, in certain embodiments, a split prime editor protein may be split into a N-terminal and a C-terminal half for separate delivery in AAV vectors, and subsequently translated and colocalized in a target cell to reform the complete polypeptide or split prime editor protein. In such cases, separate halves of a protein may each comprise a split-intein to facilitate colocalization and reformation of the complete protein by the mechanism of intein facilitated trans splicing. In some embodiments, a split prime editor comprises a N-terminal half fused to an intein-N, and a C-terminal half fused to an intein-C, or polynucleotides or vectors (e.g., AAV vectors) encoding each thereof. When delivered and/or expressed in a target cell, the intein-N and the intein-C can be excised via protein trans-splicing, resulting in a complete split prime editor protein in the target cell.

[0322] In some embodiments, a split prime editor comprises a Cas9 (H840A)nickase and a wild type M-MLV RT (referred to as “PE1”, and a prime editing system or composition referred to as PE1 system or PE1 composition). In some embodiments, a split prime editor comprises one or more individual components of PE1. In some embodiments, a split prime editor protein comprises a Cas9 (H840A)nickase and a M-MLV RT that has amino acid substitutions D200N, T330P, T306K, W313F, and L603W compared to a wild type M-MLV RT (the protein referred to as “PE2”, and a prime editing system or composition referred to as PE2 system or PE2 composition). In some embodiments, a split prime editor protein is PE2. In some embodiments, a split prime editor protein comprises one or more individual components of PE2.

[0323] In various embodiments, a split prime editor proteins comprises an amino acid sequence that is at least about 70% identical, at least about 80% identical, at least about 90% identical, at least about 95% identical, at least about 96% identical, at least about 97% identical, at least about 98% identical, at least about 99% identical, at least about 99.5% identical, or at least about 99.9% identical to PE1, PE2, or any of the split prime editor sequences described herein or known in the art.

### Scaffold RNA

[0324] In certain aspects, the prime editor systems described herein comprise scaffold RNA. The term “scaffold RNA” or “prime editing guide RNA”, or “PEgRNA”, refers to a guide polynucleotide that comprises one or more intended nucleotide edits for incorporation into the target DNA. Such terms can be used interchangeably.

[0325] In some embodiments, the first polypeptide and/or the second polypeptide comprises an adapter protein that has affinity for the scaffold RNA. Exemplary adapter proteins include but are not limited to a MS2 coat/adapter protein (MCP), a PP7 adapter protein, a Qβ adapter protein, a F2 adapter protein, a GA adapter protein, a fr adapter protein, a JP501 adapter protein, a M12 adapter protein, a R17 adapter protein, a BZ13 adapter protein, a JP34 adapter protein, a JP500 adapter protein, a KU1 adapter protein, a M11 adapter protein, a MX1 adapter protein, a TW18 adapter protein, a VK adapter protein, a SP adapter protein, a FI adapter protein, a ID2 adapter protein, a NL95 adapter protein, a TW19 adapter protein, a AP205 adapter protein, a ϕCb5 adapter protein, a ϕCb8r adapter protein, a § 12r adapter protein, a ϕCb23r adapter protein, a 7s adapter protein and a PRR1 adapter protein.

[0326] In various embodiments, two separate protein domains (e.g., a Cas9 domain and a polymerase domain) may be colocalized to one another to form a functional complex (akin to the function of a protein comprising the two separate protein domains) by using an “RNA-protein recruitment system,” such as the “MS2 tagging technique.” Such systems generally tag one protein domain with an “RNA-protein interaction domain” (aka “RNA-protein recruitment domain”) and the other with an “RNA-binding protein” that specifically recognizes and binds to the RNA-protein interaction domain, e.g., a specific hairpin structure. These types of systems can be leveraged to colocalize the domains of a split prime editor, as well as to recruitment additional functionalities to a split prime editor, such as a UGI domain. In one example, the MS2 tagging technique is based on the natural interaction of the MS2 bacteriophage coat protein (“MCP” or “MS2cp”) with a stem-loop or hairpin structure present in the genome of the phage, i.e., the “MS2 hairpin.” In the case of the MS2 hairpin, it is recognized and bound by the MS2 bacteriophage coat protein (MCP). Thus, in one exemplary scenario a deaminase-MS2 fusion can recruit a Cas9-MCP fusion.

[0327] The adaptor protein may utilize known linkers to attach such functional domains. The adaptor protein may be any number of proteins that binds to an aptamer or recognition site introduced into the modified sgRNA and which allows proper positioning of one or more functional domains, once the sgRNA has been incorporated into the CRISPR complex, to affect the target with the attributed function. Such adapter proteins may be coat proteins (e.g., bacteriophage coat proteins). The functional domains associated with such adaptor proteins (e.g., in the form of fusion protein) may include, for example, one or more domains from the group consisting of methylase activity, demethylase activity, transcription activation activity, transcription repression activity, transcription release factor activity, histone modification activity, RNA cleavage activity, DNA cleavage activity, nucleic acid binding activity, and molecular switches (e.g., light inducible).

[0328] In some embodiments, the prime editor system further comprises a scaffold protein that has affinity for the first polypeptide and/or the second polypeptide. In certain embodiments, the scaffold protein is fused to the first polypeptide or the second polypeptide. In certain embodiments, the scaffold protein is not fused to either the first polypeptide or the second polypeptide. In some embodiments, the prime editor system further comprises a second scaffold protein that has affinity for the scaffold protein. In some embodiments, the second scaffold protein has affinity for the first polypeptide. In some embodiments, the second scaffold protein has affinity for to the second polypeptide. In certain embodiments, the second scaffold protein is fused to the first polypeptide or the second polypeptide. In certain embodiments, the second scaffold protein is not fused to either the first polypeptide or the second polypeptide. In some embodiments, the first polypeptide has affinity for an endogenous protein in a host cell. In some embodiments, the second polypeptide has affinity for the endogenous protein in a host cell. In certain embodiments, the first polypeptide has affinity for a first endogenous protein in a host cell and the second polypeptide has affinity for a second endogenous protein in a host cell, and the first endogenous protein has affinity for the second endogenous protein. In some embodiments, the first polypeptide is configured to become covalently attached to the second polypeptide in a host cell.

[0329] In some aspects, provided herein are prime editing system that include modified PEgRNAs. In some embodiments, the PEgRNA associates with and directs a split prime editor to incorporate the one or more (e.g., two or more, three or more, four or more, or five or more) intended nucleotide edits into the target gene via prime editing. “Nucleotide edit” or “intended nucleotide edit” refers to a specified deletion of one or more nucleotides at one specific position, insertion of one or more nucleotides at one specific position, substitution of a single nucleotide, or other alterations at one specific position to be incorporated into the sequence of the target gene. Intended nucleotide edit may refer to the edit on the editing template as compared to the sequence on the target strand of the target gene, or may refer to the edit encoded by the editing template on the newly synthesized single stranded DNA that replaces the editing target sequence, as compared to the editing target sequence. In some embodiments, a PEgRNA comprises a spacer sequence that is complementary or substantially complementary to a search target sequence on a target strand of the target gene. In some embodiments, the PEgRNA comprises a gRNA core that associates with a DNA binding domain, e.g., a CRISPR-Cas protein domain, of a split prime editor. In some embodiments, the PEgRNA further comprises an extended nucleotide sequence comprising one or more intended nucleotide edits compared to the endogenous sequence of the target gene, wherein the extended nucleotide sequence may be referred to as an extension arm. In certain embodiments, the PERNA comprises a primer binding site sequence (PBS) that can initiate target-primed DNA synthesis. In some embodiments, the PEgRNA comprises an editing template that comprises one or more intended nucleotide edits to be incorporated in the target gene by prime editing. In some embodiments, the extension arm comprises a PBS. In some embodiments, the extension arm comprises an editing template that comprises one or more intended nucleotide edits to be incorporated in the target gene by prime editing.

[0330] A “primer binding site” (PBS or primer binding site sequence) is a single-stranded portion of the PEgRNA that comprises a region of complementarity to the PAM strand (i.e. the non-target strand or the edit strand). The PBS is complementary or substantially complementary to a sequence on the PAM strand of the double stranded target DNA that is immediately upstream of the nick site. In some embodiments, in the process of prime editing, the PEgRNA complexes with and directs a split prime editor to bind the search target sequence on the target strand of the double stranded target DNA, and generates a nick at the nick site on the non-target strand of the double stranded target DNA. In some embodiments, the PBS is complementary to or substantially complementary to, and can anneal to, a free 3′ end on the non-target strand of the double stranded target DNA at the nick site. In some embodiments, the PBS annealed to the free 3′ end on the non-target strand can initiate target-primed DNA synthesis.

[0331] An “editing template” of a PERNA is a single-stranded portion of the PEgRNA that is 5′ of the PBS and comprises a region of complementarity to the PAM strand (i.e. the non-target strand or the edit strand), and comprises one or more intended nucleotide edits compared to the endogenous sequence of the double stranded target DNA. In some embodiments, the editing template and the PBS are immediately adjacent to each other. Accordingly, in some embodiments, a PEgRNA in prime editing comprises a single-stranded portion that comprises the PBS and the editing template immediately adjacent to each other. In some embodiments, the single stranded portion of the PERNA comprising both the PBS and the editing template is complementary or substantially complementary to an endogenous sequence on the PAM strand (i.e. the non-target strand or the edit strand) of the double stranded target DNA except for one or more non-complementary nucleotides at the intended nucleotide edit positions. As used herein, regardless of relative 5′-3′ positioning in other context, the relative positions as between the PBS and the editing template, and the relative positions as among elements of a PEgRNA, are determined by the 5′ to 3′ order of the PEgRNA as a single molecule regardless of the position of sequences in the double stranded target DNA that may have complementarity or identity to elements of the PEgRNA. In some embodiments, the editing template is complementary or substantially complementary to a sequence on the PAM strand that is immediately downstream of the nick site, except for one or more non-complementary nucleotides at the intended nucleotide edit positions. The endogenous, e.g., genomic, sequence that is complementary or substantially complementary to the editing template, except for the one or more non-complementary nucleotides at the position corresponding to the intended nucleotide edit, may be referred to as an “editing target sequence”. In some embodiments, the editing template has identity or substantial identity to a sequence on the target strand that is complementary to, or having the same position in the genome as, the editing target sequence, except for one or more insertions, deletions, or substitutions at the intended nucleotide edit positions. In some embodiments, the editing template encodes a single stranded DNA, wherein the single stranded DNA has identity or substantial identity to the editing target sequence except for one or more insertions, deletions, or substitutions at the positions of the one or more intended nucleotide edits.

### Spacers

[0332] A spacer may guide a prime editing complex to a genomic locus with identical or substantially identical sequence during prime editing. In some embodiments, the PERNA comprises a spacer. In some embodiments, the length of the spacer varies from at least 10 nucleotides to 100 nucleotides. For examples, a spacer may be at least 10 nucleotides, at least 11 nucleotides, at least 12 nucleotides, at least 13 nucleotides, at least 14 nucleotides, at least 15 nucleotides, at least 16 nucleotides, at least 17 nucleotides, at least 18 nucleotides, at least 19 nucleotides, at least 20 nucleotides, at least 30 nucleotides, at least 40 nucleotides, at least 50 nucleotides, at least 60 nucleotides, at least 70 nucleotides, at least 80 nucleotides, at least 90 nucleotides, at least 100 nucleotides. In some embodiments, the spacer is 16 nucleotides, 17 nucleotides, 18 nucleotides, 19 nucleotides, 20 nucleotides, 21 nucleotides, 22 nucleotides, 23 nucleotides, 24 nucleotides, or 25 nucleotides in length. In some embodiments, the spacer is from 15 nucleotides to 30 nucleotides in length, 15 to 25 nucleotides in length, 18 to 22 nucleotides in length, 10 to 20 nucleotides in length, 20 to 30 nucleotides in length, 30 to 40 nucleotides in length, 40 to 50 nucleotides in length, 50 to 60 nucleotides in length, 60 to 70 nucleotides in length, 70 to 80 nucleotides in length, or 90 nucleotides to 100 nucleotides in length. In some embodiments, the spacer is 20 nucleotides in length. In some embodiments, the spacer is 17 to 18 nucleotides in length.

[0333] In some embodiments, a spacer sequence comprises a region that has substantial complementarity to a search target sequence on the target strand of a double stranded target DNA. In some embodiments, the spacer sequence of a PEgRNA is identical or substantially identical to a protospacer sequence on the edit strand of the target gene (except that the protospacer sequence comprises thymine and the spacer sequence may comprise uracil). In some embodiments, the spacer sequence is at least about 70%, 75%, 80%, 85%, 90%, 95%, or 100% complementary to a search target sequence in the target gene. In some embodiments, the spacer comprises is substantially complementary to the search target sequence.

[0334] In some embodiments, the length of the spacer varies from at least 10 nucleotides to 100 nucleotides. For examples, a spacer may be at least 10 nucleotides, at least 11 nucleotides, at least 12 nucleotides, at least 13 nucleotides, at least 14 nucleotides, at least 15 nucleotides, at least 16 nucleotides, at least 17 nucleotides, at least 18 nucleotides, at least 19 nucleotides, at least 20 nucleotides, at least 30 nucleotides, at least 40 nucleotides, at least 50 nucleotides, at least 60 nucleotides, at least 70 nucleotides, at least 80 nucleotides, at least 90 nucleotides, at least 100 nucleotides. In some embodiments, the spacer is 16 nucleotides, 17 nucleotides, 18 nucleotides, 19 nucleotides, 20 nucleotides, 21 nucleotides, 22 nucleotides, 23 nucleotides, 24 nucleotides, or 25 nucleotides in length. In some embodiments, the spacer is from 15 nucleotides to 30 nucleotides in length, 15 to 25 nucleotides in length, 18 to 22 nucleotides in length, 10 to 20 nucleotides in length, 20 to 30 nucleotides in length, 30 to 40 nucleotides in length, 40 to 50 nucleotides in length, 50 to 60 nucleotides in length, 60 to 70 nucleotides in length, 70 to 80 nucleotides in length, or 90 nucleotides to 100 nucleotides in length. In some embodiments, the spacer is 20 nucleotides in length. In some embodiments, the spacer is 17 to 18 nucleotides in length.

[0335] As used herein in a PEgRNA or a nick guide RNA sequence, or fragments thereof such as a spacer, PBS, or RTT sequence, unless indicated otherwise, it should be appreciated that the letter “T” or “thymine” indicates a nucleobase in a DNA sequence that encodes the PEgRNA or guide RNA sequence, and is intended to refer to a uracil (U)nucleobase of the PEgRNA or guide RNA or any chemically modified uracil nucleobase known in the art, such as 5-methoxyuracil.

### Primer Binding Site (PBS)

[0336] A PERNA may comprise a primer binding site (PBS) and an editing template (e.g., an RTT). The extension arm of a PEgRNA may comprise a PBS and an editing template. In some embodiments, a PBS may be partially complementary to the spacer. In some embodiments, the editing template (e.g., RTT) is partially complementary to the spacer. In some embodiments, the editing template (e.g., RTT) and the primer binding site (PBS) are each partially complementary to the spacer.

[0337] An extension arm of a PEgRNA may comprise a primer binding site sequence (PBS, or PBS sequence) that hybridizes with a free 3′ end of a single stranded DNA in the target gene generated by nicking with a split prime editor. The length of the PBS sequence may vary depending on, e.g., the split prime editor components, the search target sequence and other components of the PEgRNA. In some embodiments, the length of the primer binding site (PBS) varies from at least 2 nucleotides to 50 nucleotides. For examples, a primer binding site (PBS) may be at least 2 nucleotides, at least 3 nucleotides, at least 4 nucleotides, at least 5 nucleotides, at least 6 nucleotides, at least 7 nucleotides, at least 8 nucleotides, at least 9 nucleotides, at least 10 nucleotides, at least 11 nucleotides, at least 12 nucleotides, at least 13 nucleotides, at least 14 nucleotides, at least 15 nucleotides, at least 16 nucleotides, at least 17 nucleotides, at least 18 nucleotides, at least 19 nucleotides, at least 20 nucleotides, at least 30 nucleotides, at least 40 nucleotides, or at least 50 nucleotides in length. In some embodiments, the PBS is at least 6 nucleotides in length. In some embodiments, the PBS is about 4 to 16 nucleotides, about 6 to 16 nucleotides, about 6 to 18 nucleotides, about 6 to 20 nucleotides, about 8 to 20 nucleotides, about 10 to 20 nucleotides, about 12 to 20 nucleotides, about 14 to 20 nucleotides, about 16 to 20 nucleotides, or about 18 to 20 nucleotides in length. In some embodiments, the PBS is about 7 to 15 nucleotides in length. In some embodiments, the PBS is 6, 7, 8, 9, 10, 11, 12, 13, 14, 15, 16, 17, 18, 19, or 20 nucleotides in length. In some embodiments, the PBS is 8, 9, 10, 11, 12, 13, or 14 nucleotides in length.

[0338] The PBS may be complementary or substantially complementary to a DNA sequence in the edit strand of the target gene. By annealing with the edit strand at a free hydroxy group, e.g., a free 3′ end generated by split prime editor nicking, the PBS may initiate synthesis of a new single stranded DNA encoded by the editing template at the nick site. In some embodiments, the PBS is at least about 70%, 75%, 80%, 85%, 90%, 95%, or 100% complementary to a region of the edit strand of the target gene. In some embodiments, the PBS is perfectly complementary, or 100% complementary, to a region of the edit strand of the target gene.

[0339] An extension arm of a PERNA may comprise an editing template that serves as a DNA synthesis template for the DNA polymerase in a split prime editor during prime editing.

[0340] The length of an editing template may vary depending on, e.g., the split prime editor components, the search target sequence and other components of the PEgRNA. In some embodiments, the editing template serves as a DNA synthesis template for a reverse transcriptase, and the editing template is referred to as a reverse transcription editing template (RTT).

[0341] The editing template (e.g., RTT), in some embodiments, is 2, 3, 4, 5, 6, 7, 8, 9, 10, 11, 12, 13, 14, 15, 16, 17, 18, 19, 20, 21, 22, 23, 24, or 25 nucleotides in length. In some embodiments, the RTT is 12, 13, 14, 15, 16, 17, 18, 19, 20, 21, 22, 23, 24, or 25 nucleotides in length. In some embodiments, the RTT is 16, 17, 18, 19, 20, 21, 22, 23, 24, 25, 26, 27, 28, 29, 30, 31, 32, 33, 34, 35, 36, 37, 38, 39, or 40 nucleotides in length.

[0342] In some embodiments, the editing template (e.g., RTT) sequence is about 70%, 75%, 80%, 85%, 90%, 95%, or 99% complementary to the editing target sequence on the edit strand of the target gene. In some embodiments, the editing template sequence (e.g., RTT) is substantially complementary to the editing target sequence. In some embodiments, the editing template sequence (e.g., RTT) is complementary to the editing target sequence except at positions of the intended nucleotide edits to be incorporated into the target gene. In some embodiments, the editing template comprises a nucleotide sequence comprising about 85% to about 95% complementarity to an editing target sequence in the edit strand in the target gene. In some embodiments, the editing template comprises about 86%, about 87%, about 88%, about 89%, about 90%, about 91%, about 92%, about 93%, about 94%, about 95%, about 96%, about 97%, about 98%, or about 99% complementarity to an editing target sequence in the edit strand of the target gene.

[0343] In some embodiments, a PEgRNA includes only RNA nucleotides and forms an RNA polynucleotide. In some embodiments, a PEgRNA is a chimeric polynucleotide that includes both RNA and DNA nucleotides. For example, a PEgRNA can include DNA in the spacer sequence, the gRNA core, or the extension arm. In some embodiments, a PERNA comprises DNA in the spacer sequence. In some embodiments, the entire spacer sequence of a PEgRNA is a DNA sequence. In some embodiments, the PEgRNA comprises DNA in the gRNA core, for example, in a stem region of the gRNA core. In some embodiments, the PEgRNA comprises DNA in the extension arm, for example, in the editing template. An editing template that comprises a DNA sequence may serve as a DNA synthesis template for a DNA polymerase in a split prime editor, for example, a DNA-dependent DNA polymerase. Accordingly, the PEgRNA may be a chimeric polynucleotide that comprises RNA in the spacer, gRNA core, and/or the PBS sequences and DNA in the editing template.

[0344] Components of a PEgRNA may be arranged in a modular fashion. In some embodiments, the spacer and the extension arm comprising a primer binding site sequence (PBS) and an editing template, e.g., a reverse transcriptase template (RTT), can be interchangeably located in the 5′ portion of the PEgRNA, the 3′ portion of the PEgRNA, or in the middle of the gRNA core. For example, in some embodiments, a PEgRNA comprises, from 5′ to 3′: a spacer, a gRNA core, an editing template, and a PBS. In some embodiments, a PERNA comprises, from 5′ to 3′: an editing template, a PBS, a spacer, and a gRNA core. In some embodiments, the PBS and/or the editing template is positioned within the gRNA core, i.e., flanked by a first half of the gRNA core and a second half of the gRNA core.

[0345] In certain embodiments, PEgRNAs provided herein comprise i) a spacer that comprises a region of complementarity to a search target sequence in target strand of a double stranded target DNA; ii) a guide RNA (gRNA) core comprising a direct repeat, a first stem loop, and a second stem loop; iii) an editing template that comprises an intended edit compared to the double stranded target DNA; and iv) a primer binding site (PBS) that comprises a region of complementarity to a region upstream of a nick site in a non-target strand of the double stranded target DNA, wherein the PEgRNA further comprises one or more nucleic acid moieties at its 3′ end.

[0346] In some embodiments, the PEgRNA comprises, in 5′ to 3′ order, the spacer, the gRNA core, the editing template, and the PBS.

[0347] In certain embodiments, PEgRNAs provided herein comprise i) a spacer that comprises a region of complementarity to a search target sequence in target strand of a double stranded target DNA; ii) a guide RNA (gRNA) core comprising a direct repeat, a first stem loop, and a second stem loop; iii) an editing template that comprises an intended edit compared to the double stranded target DNA; and iv) a primer binding site (PBS) that comprises a region of complementarity to a region upstream of a nick site in a non-target strand of the double stranded target DNA, wherein the gRNA core comprises one or more sequence modifications compared to SEQ ID NO. 16.

[0348] In some embodiments, the PEgRNA comprises, in 5′ to 3′ order, the spacer, the gRNA core, the editing template, and the PBS.

[0349] In certain embodiments, PEgRNAs provided herein comprise i) a spacer that comprises a region of complementarity to a search target sequence in target strand of a double stranded target DNA; ii) a guide RNA (gRNA) core comprising a direct repeat, a first stem loop, and a second stem loop; iii) an editing template that comprises an intended edit compared to the double stranded target DNA; and iv) a primer binding site (PBS) that comprises a region of complementarity to a region upstream of a nick site in a non-target strand of the double stranded target DNA, and v) a tag sequence that comprises a region of complementarity to the PBS and/or the editing template.

[0350] In some embodiments, the PEgRNA comprises, in 5′ to 3′ order, the spacer, the gRNA core, the editing template, the PBS, and the tag sequence.

[0351] In some embodiments, the PEgRNA comprises, in 5′ to 3′ order, the editing template, the PBS, the tag sequence, the spacer, and the gRNA core.

[0352] In certain embodiments, PEgRNAs provided herein comprise in 5′ to 3′ order: i) a spacer that comprises a region of complementarity to a search target sequence in target strand of a double stranded target DNA; ii) 5′ part of a guide RNA (gRNA) core; iii) an editing template that comprises an intended edit compared to the double stranded target DNA; iv) a primer binding site (PBS) that comprises a region of complementarity to a region upstream of a nick site in a non-target strand of the double stranded target DNA; and v) a 3′ part of a gRNA core. In some embodiments, the 5′ part of the gRNA core and the 3′ part of the gRNA core form a complete functional gRNA core that can associate with a programmable DNA binding protein of a split prime editor, e.g., a Cas9 nickase. In some embodiments, the 5′ part of the gRNA core comprises a direct repeat, a first stem loop, and a 5′ half of a second stem loop. In some embodiments, the 3′ part of the gRNA core comprises a 3′ half of a second stem loop and a third stem loop. In some embodiments, the PEgRNA further comprises a tag sequence that comprises a region of complementarity to the PBS and/or the editing template.

[0353] In certain embodiments, PEgRNAs provided herein comprise: i) a first sequence comprising a spacer that comprises a region of complementarity to a search target sequence in target strand of a double stranded target DNA, and a first half of a gRNA core; and ii) a second sequence comprising a second half of the gRNA core, an editing template that comprises an intended edit compared to the double stranded target DNA; a primer binding site (PBS) that comprises a region of complementarity to a region upstream of a nick site in a non-target strand of the double stranded target DNA; and, wherein the gRNA core comprises a direct repeat, a first stem loop, and a second stem loop. In certain embodiments, PEgRNAs provided herein comprise i) a first sequence comprising an editing template that comprises an intended edit compared to the double stranded target DNA; a primer binding site (PBS) that comprises a region of complementarity to a region upstream of a nick site in a non-target strand of the double stranded target DNA; a spacer that comprises a region of complementarity to a search target sequence in target strand of a double stranded target DNA; and a first half of a gRNA core; and ii) a second sequence comprising a second half of a gRNA core, wherein the gRNA core comprises a direct repeat, a first stem loop, and a second stem loop. In some embodiments, the first half of the gRNA core comprises a direct repeat, a first stem loop, and a 5′ half of a second stem loop. In some embodiments, the second part of the gRNA core comprises a 3′ half of a second stem loop and a third stem loop. In some embodiments, the first half of the gRNA core comprises a first half of a direct repeat. In some embodiments, the second half of the gRNA core comprises a second half of a direct repeat, a first stem loop, a second stem loop, and a third stem loop.

[0354] In some embodiments, the first sequence is on a first molecule and the second sequence is on a second molecule.

[0355] In some embodiments, the first sequence and the second sequence are on the same molecule.

[0356] Provided herein in some embodiments are example sequences for PEgRNA spacers, PBS, RTT, and ngRNA spacers for a prime editing system comprising a nuclease that recognizes the PAM sequence “NGG.” In some embodiments, a PAM motif on the edit strand comprises an “NGG” motif, wherein N is any nucleotide. In some embodiments, a PEgRNA of this disclosure is part of a prime editing system that recognizes the PAM motif CGG. In some embodiments, a PERNA of this disclosure is part of a prime editing system that recognizes the PAM motif AGG.

Modified gRNA Cores

[0357] In some embodiments, a gRNA core of a PEgRNA associates with a programmable DNA binding domain in a split prime editor. In some embodiments, the gRNA core comprises a direct repeat, a first stem loop, and a second stem loop. In some embodiments, the gRNA core further comprises a third stem loop. A guide RNA core (also referred to herein as the gRNA core, gRNA scaffold, or gRNA backbone sequence) of a PEgRNA may contain a polynucleotide sequence that binds to a DNA binding domain (e.g., Cas9) of a split prime editor. The gRNA core may interact with a split prime editor as described herein, for example, by association with a DNA binding domain, such as a DNA nickase of the split prime editor.

[0358] One of skill in the art will recognize that different split prime editors having different DNA binding domains from different DNA binding proteins may require different gRNA core sequences specific to the DNA binding protein. In some embodiments, the gRNA core is capable of binding to a Cas9-based split prime editor. In some embodiments, the gRNA core is capable of binding to a Cpf1-based split prime editor. In some embodiments, the gRNA core is capable of binding to a Cas12b-based split prime editor.

[0359] In some embodiments, the gRNA core comprises regions and secondary structures involved in binding with specific CRISPR Cas proteins. For example, in a Cas9 based prime editing system, the gRNA core of a PEgRNA may comprise one or more regions of a base paired regions. In some embodiments, a gRNA core capable of binding to a Cas9 comprises, from 5′ to 3′: a repeat sequence, a loop structure, an antirepeat sequence, a first stem loop, a second stem loop, and a third stem loop. As used herein, a repeat sequence and an antirepeat sequence refer to the nucleic acid secondary structure formed by the direct repeat region, formed by base pairing between sequences equivalent to the crRNA and tracrRNA of a Cas9 guide RNA. The repeat sequence and the antirepeat sequence may be connected by a loop structure, and the secondary structure formed by base pairing between the repeat and antirepeat sequence may be referred to as the direct repeat region (alternatively, the repeat, antirepeat, and the connecting loop structure may be referred to as the tetraloop). In some embodiments, the direct repeat region of the gRNA core comprises one or more base paired regions: a base paired “lower stem” adjacent to the spacer sequence and a base paired “upper stem” following the lower stem, where the lower stem and upper stem may be connected by a “bulge” comprising unpaired RNAsAs used herein, positions of alterations to the gRNA core may be referred to in the context of the secondary structure of the gRNA core. For example, a “first base pair in the direct repeat (or lower stem)” refers to the base pair between the 5′ most nucleotide in the repeat sequence and the complementary nucleotide that is the 3′ most nucleotide in the antirepeat sequence, and a “second base pair in the direct repeat (or lower stem)” refers to the base pair between the second 5′ most nucleotide in the repeat sequence and the complementary nucleotide in the antirepeat sequence. Similarly, the “start” or “beginning” base pair of a second stem loop refers to the base pair formed between the 5′ most nucleotide in the second stem loop and the complementary nucleotide in the complementary portion of the second stem loop. The “end” or “last” base pair of a second stem loop refers to, wherein the second stem loop is formed by base pairing of a 5′ portion of the stem and a 3′ portion of the stem connected by a loop, the base pair formed between the 3′ most nucleotide in the 5′ portion of the stem and the complementary nucleotide in the complementary 3′ portion of the stem.

[0360] The gRNA core may further comprise, 3′ to the direct repeat, a first stem loop, a second stem loop, and a third stem loop. In some embodiments, the gRNA core may comprise a direct repeat, and at least one, at least two, or at least three stem loops. As used herein, a stem loop (or a hairpin loop) is base pairing pattern that can occur in single-stranded nucleic acids. In some embodiments, a stem loop may be formed when two regions of the same nucleic acid strand are at least partially complementary in nucleotide sequence when read in opposite directions, therefore, the base-pairs can form a double helix that comprises an unpaired loop. Stem loops within a gRNA core described herein may be numbered starting from the 5′ to the 3′ end of the gRNA core. For example, the “first stem loop” would be the first stem loop (not including any direct repeats) at the 5′ end proximal to the direct repeat of the gRNA core sequence. A “second stem loop” would be the second stem loop (not including any direct repeats) following the first stem loop in a 5′ to 3′ direction, and so on.

[0361] In some embodiments, the gRNA core comprises nucleotide alterations as compared to a wild type gRNA core. For example, in some embodiments, one or more nucleotides in the gRNA core is deleted, inserted, and/or substituted as compared to a wild type gRNA core. In some embodiments, the gRNA core of a PEgRNA is capable of binding to a Cas9 (e.g. nCas9) in a split prime editor, and comprise one or more nucleotide alterations or modifications as compared to a wild type CRISPR-Cas9 guide RNA scaffold. In some embodiments, the gRNA core comprises one or more nucleotide insertions, deletions, and/or substitutions in the direct repeat as compared to a wild type CRISPR-Cas9 guide RNA scaffold. In some embodiments, the gRNA core comprises one or more nucleotide insertions, deletions, and/or substitutions in the lower stem or upper stem of the direct repeat. In some embodiments, the gRNA core comprises one or more nucleotide substitutions in the lower stem of the direct repeat. In some embodiments, the gRNA core comprises one or more nucleotide insertions in the upper stem of the direct repeat. In some embodiments, the gRNA core comprises one or more nucleotide insertions, deletions, and/or substitutions in the first stem loop as compared to a wild type CRISPR-Cas9 guide RNA scaffold. In some embodiments, the gRNA core comprises one or more nucleotide insertions, deletions, and/or substitutions in the second stem loop as compared to a wild type CRISPR-Cas9 guide RNA scaffold. In some embodiments, the gRNA core comprises one or more nucleotide insertions in the second stem loop. In some embodiments, the gRNA core comprises one or more nucleotide insertions, deletions, and/or substitutions in the third stem loop as compared to a wild type CRISPR-Cas9 guide RNA scaffold. In some embodiments, the gRNA core comprises one or more nucleotide insertions, deletions, and/or substitutions as compared to a wild type CRISPR-Cas9 guide RNA scaffold, and comprises a third stem loop that has the same sequence as the third stem loop of a wild type CRISPR-Cas9 guide RNA scaffold.

[0362] In some embodiments, RNA nucleotides in the lower stem, upper stem, an/or the stem loop regions may be replaced with one or more DNA sequences. In some embodiments, the gRNA core comprises unmodified or wild type RNA sequences in the nexus and/or the bulge regions. In some embodiments, the gRNA core does not include long stretches of A-U pairs, for example, a GUUUU-AAAAC pairing element.

[0363] In some embodiments, the PEgRNA comprises a guide RNA (gRNA) core that associates with a DNA binding domain, e.g., a CRISPR-Cas protein domain, of a prime editor. In some embodiments, the PEgRNA comprises a guide RNA (gRNA) core that associates with a DNA binding domain, e.g., a Cas9 domain, of a split prime editor. In certain aspects, the gRNA core of the PEgRNAs provided herein comprises one or more sequence modifications compared to SEQ ID NO. 16. In some embodiments, the one or more (e.g., two or more, three or more, four or more, or five or more) sequence modifications comprises a gRNA core difference. In some embodiments, the gRNA core comprises a sequence selected from SEQ ID NOs: 16-61. In some embodiments, the gRNA core comprises a first gRNA core sequence comprising a 5′ half of the gRNA core and a second gRNA core sequence comprising a 3′ half of the gRNA core, and wherein the PEgRNA comprises, in 5′ to 3′ order: the spacer, the first gRNA core sequence, the editing template, the PBS, the tag sequence, and the second gRNA core sequence. The 5′ half and the 3′ half can form a functional gRNA core for association/binding with a programmable DNA binding protein, e.g., a Cas protein. One of skill in the art will recognize that different split prime editors having different DNA binding domains from different DNA binding proteins may require different gRNA core sequences specific to the DNA binding protein. In some embodiments, the gRNA core is capable of binding to a Cas9-based split prime editor. In some embodiments, the gRNA core is capable of binding to a Cpf1-based split prime editor. In some embodiments, the gRNA core is capable of binding to a Cas12b-based split prime editor.

[0364] In some embodiments, the gRNA core of the PEgRNAs provided herein comprises one or more sequence modifications compared to SEQ ID NO. 16. In some embodiments, the one or more sequence modifications comprises a gRNA core alteration compared to a Cas9 guide RNA scaffold (e.g., SEQ ID No.: 16).

[0365] In some embodiments, the one or more sequence modifications comprises a sequence modification in the direct repeat. In some embodiments, sequence modification in the gRNA core of a PERNA comprises one or more nucleotide flips. As used herein, the term “flip” refers to the modification of a sequence such that nucleotide bases that that base-pair with each other in the stem of a loop or hairpin structure are exchanged for each other. For example, an original unmodified stem structure may comprise an A/U base pair, with A in a first strand (or region) and U in the complementary strand (or region) of the stem structure. An A/U to U/A base pair flip substitutes the Adenosine in the first strand (or region) with a Uracil and substitutes the Uracil in the complementary strand (or region) with an Adenosine, thereby “flipping” the A/U base pair to an U/A base pair. In some embodiments, a flip of nucleotides can be used, for example, to break-up sequences containing repeats of the same base (for example sequences of at least 3, 4, 5, 6, or 7 consecutive A nucleotides, U nucleotides, C nucleotides, or G nucleotides) present in a nucleic acid molecule without disrupting its secondary structure. In some embodiments, instead of a flip, the original base pair is replaced with an alternative base pair (e.g., an A/U base pair is replaced with a C/G or G/C base pair).

[0366] In some embodiments, the direct repeat of the gRNA core may comprise at least one flip of an A-U base pair in a lower stem of the direct repeat, optionally wherein the lower stem does not contain 2, 3, 4, or more contiguous A-U base pairs; and/or at least one flip of an A/U base pair in the direct repeat comprises a flip of the fourth A/U base pair in the lower stem of the direct repeat.

[0367] In some embodiments, the sequence modification in the direct repeat comprises insertion of one or more nucleotides in the upper stem of the direct repeat of the gRNA core, thereby resulting in an extension of the upper stem as compared to a wild type gRNA core, e.g., as set forth in SEQ ID NO: 16. The extension in the upper stem may be from 1, 2, 3, 4, 5, 6, 7, 8, 9, 10, 11, 12, 13, 14, 15, or 16 base pairs. In some embodiments, the gRNA core comprises a sequence selected from SEQ ID NOs: 26-37.

[0368] In some embodiments, the one or more sequence modifications comprises a sequence modification in the second stem loop.

[0369] In some embodiments, the modification in the second stem loop comprises a flip of a G/C base pair. In some embodiments, the modification in the second stem loop comprises a flip of an A/U base pair in the second stem loop. In some embodiments, the modification in the second stem loop comprises substitution of a A/U base pair with a G/C base pair. In some embodiments, the modification in the second stem loop comprises substitution of a U/A base pair with a G/C base pair. In some embodiments, the modification in the second stem loop comprises substitution of a A/U base pair with a G/C base pair, and further comprises a substitution of a U/A base pair with a G/C base pair. In some embodiments, the gRNA core comprises a nucleic acid sequence selected from SEQ ID NOs: 21, 22 or 25. Exemplary gRNA core sequences and sequence modifications are shown in Table 5. In some embodiments, the gRNA core comprises a sequence selected from SEQ ID NOs: 16-61.

[0370] In some embodiments, the one or more sequence modifications comprises a modification in a third stem loop of the gRNA core. In some embodiments, the modification in the third stem loop comprises a flip of a G/C base pair. In some embodiments, the modification in the third stem loop comprises a flip of an A/U base pair.

[0371] The gRNA core may comprise any one of modifications described in Table 5 or any combination thereof.

[0372] In some embodiments, the gRNA core has a flipped 1st A-U base pair in the direct repeat. In some embodiments, the gRNA core has a flipped 2nd A-U base in the direct repeat. In some embodiments, the gRNA core has a flipped 3rd A-U base pair in the direct repeat. In some embodiments, the gRNA core has a flipped 4th A-U base pair in the direct repeat.

[0373] In some embodiments, the gRNA core comprises a substitution of an A-U base pair (bp) with a G-C Bp at the fourth base pair of the second stem loop. In some embodiments, the gRNA core comprises a substitution of an A-U Bp with a C-G Bp at the fourth base pair of second stem loop.

[0374] In some embodiments, the gRNA core comprises a five base pair extension of the upper stem of the direct repeat (tgctg and cagca). In some embodiments, the gRNA has a “flip and extension” (M4 and E5), as described in Nelson, J. W., Randolph, P. B., Shen, S. P. et al. Engineered pegRNAs improve prime editing efficiency. Nat Biotechnol (2021). The M4 modification is flipping the 4th A-U base pair in the direct repeat of gRNA core. The E5 modification is extending the end of the upper stem of the direct repeat with a five bp sequence (tgctg and cagca).

[0375] In some embodiments, a gRNA core comprises a M4 modification. In some embodiments, a gRNA core comprises a E5 modification. In some embodiments, a gRNA core comprises a M4 modification and a E5 modification.

[0376] In some embodiments, a gRNA core comprises a substitution of a A/U base pair with a G/C base pair in the second stem loop. In some embodiments, the gRNA core comprises a substitution of a A/U base pair with a G/C base pair at the first base pair of the second stem loop.

[0377] In some embodiments, the gRNA core has a 1 base pair extension in the upper stem of the direct repeat sequence (c and g). In some embodiments, the gRNA core has a 2 base pair extension in the upper stem of the direct repeat sequence (cc and gg). In some embodiments, the gRNA core has a 2 base pair extension in the upper stem of the direct repeat sequence (ca and tg). In some embodiments, the gRNA core has a 2 base pair extension in the upper stem of the direct repeat sequence (cg and tg). In some embodiments, the gRNA core has a 1 base pair extension in the upper stem of the direct repeat sequence (a and t). In some embodiments, the gRNA core has a 2 base pair extension in the upper stem of the direct repeat sequence (ac and gt). In some embodiments, the gRNA core has a 2 base pair extension in the upper stem of the direct repeat sequence (aa and tt). In some embodiments, the gRNA core has a 2 base pair extension in the upper stem of the direct repeat sequence (ag and tt). In some embodiments, the gRNA core has a 3 base pair extension in the upper stem of the direct repeat sequence (ccc and ggg). In some embodiments, the gRNA core has a 4 base pair extension in the upper stem of the direct repeat sequence (ccac and gtgg). In some embodiments, the gRNA core has a 5 base pair extension in the upper stem of the direct repeat sequence (ccaac and gttgg). In some embodiments, the gRNA core has a 6 base pair extension in the upper stem of the direct repeat sequence (ccacac and gtgtgg).

[0378] In some embodiments, the gRNA core has a 1 base pair extension in the second stem loop sequence (c and g). In some embodiments, the gRNA core has a 2 base pair extension in the second stem loop sequence (cc and gg). In some embodiments, the gRNA core has a 2 base pair extension in the second stem loop sequence (ca and tg). In some embodiments, the gRNA core has a 2 base pair extension in the second stem loop sequence (cg and tg). In some embodiments, the gRNA core has a 1 base pair extension in the second stem loop sequence (a and t). In some embodiments, the gRNA core has a 2 base pair extension in the second stem loop sequence (ac and gt). In some embodiments, the gRNA core has a 2 base pair extension in the second stem loop sequence (aa and tt). In some embodiments, the gRNA core has a 2 base pair extension in the second stem loop sequence (ag and tt). In some embodiments, the gRNA core has a 3 base pair extension in the second stem loop sequence (ccc and ggg). In some embodiments, the gRNA core has a 4 base pair extension in the second stem loop sequence (ccac and gtgg). In some embodiments, the gRNA core has a 5 base pair extension in the second stem loop sequence (ccaac and gttgg). In some embodiments, the gRNA core has a 6 base pair extension in the second stem loop sequence (ccacac and gtgtgg).

[0379] In some embodiments, the gRNA core has a 1 base pair extension in the third stem loop sequence (c and g). In some embodiments, the gRNA core has a 2 base pair extension in the third stem loop sequence (cc and gg). In some embodiments, the gRNA core has a 2 base pair extension in the third stem loop sequence (ca and tg). In some embodiments, the gRNA core has a 2 base pair extension in the third stem loop sequence (cg and tg). In some embodiments, the gRNA core has a 1 base pair extension in the third stem loop sequence (a and t). In some embodiments, the gRNA core has a 2 base pair extension in the third stem loop sequence (ac and gt). In some embodiments, the gRNA core has a 2 base pair extension in the third stem loop sequence (aa and tt). In some embodiments, the gRNA core has a 2 base pair extension in the third stem loop sequence (ag and tt). In some embodiments, the gRNA core has a 3 base pair extension in the third stem loop sequence (ccc and ggg). In some embodiments, the gRNA core has a 4 base pair extension in the third stem loop sequence (ccac and gtgg). In some embodiments, the gRNA core has a 5 base pair extension in the third stem loop sequence (ccaac and gttgg). In some embodiments, the gRNA core has a 6 base pair extension in the third stem loop sequence (ccacac and gtgtgg).

[0380] In some embodiments, as compared to editing efficiency with a control PEgRNA having a gRNA core without modifications, a gRNA core modification increase efficiency of editing by at least 10%, at least 20%, at least 30%, at least 40%, at least 50%, at least 60%, at least 70%, at least 80%, at least 90%, at least 100%, at least 110%, at least 120%, at least 130%, at least 140%, at least 150%, at least 160%, at least 170%, at least 180%, at least 190%, at least 200%. Exemplary nucleotide sequence modifications in the gRNA core of a PEgRNA are provided in Table 5. Modifications compared to a wild type Cas9 gRNA scaffold sequence are shown in lower case letters.

TABLE 5
Exemplary gRNA Core Sequences

| SEQ | gRNA | |
|---|---|---|
| ID | Core | |
| NO. | name | gRNA Core Sequence |
| 16 | wild type | GTTTTAGAGCTAGAAATAGCAAGTTAAAATAAGGCTAGTCCGTTATCAACTTGAA |
| | Cas9 | AAAGTGGCACCGAGTCGGTGC |
| | guide | |
| | RNA | |
| | scaffold | |
| 17 | M1 | GaTTTAGAGCTAGAAATAGCAAGTTAAAtTAAGGCTAGTCCGTTATCAACTTGAAA |
| | | AAGTGGCACCGAGTCGGTGC |
| 18 | M2 | GTaTTAGAGCTAGAAATAGCAAGTTAAtATAAGGCTAGTCCGTTATCAACTTGAAA |
| | | AAGTGGCACCGAGTCGGTGC |
| 19 | M3 | GTTaTAGAGCTAGAAATAGCAAGTTAtAATAAGGCTAGTCCGTTATCAACTTGAAA |
| | | AAGTGGCACCGAGTCGGTGC |
| 20 | M4 | GTTTaAGAGCTAGAAATAGCAAGTTtAAATAAGGCTAGTCCGTTATCAACTTGAAA |
| | | AAGTGGCACCGAGTCGGTGC |
| 21 | sl2 gc | GTTTTAGAGCTAGAAATAGCAAGTTAAAATAAGGCTAGTCCGTTATCAACTgGAA |
| | | AcAGTGGCACCGAGTCGGTGC |
| 22 | sl2 cg | GTTTTAGAGCTAGAAATAGCAAGTTAAAATAAGGCTAGTCCGTTATCAACTcGAA |
| | | AgAGTGGCACCGAGTCGGTGC |
| 23 | E5 | GTTTTAGAGCTAtgctgGAAAcagcaTAGCAAGTTAAAATAAGGCTAGTCCGTTATCAA |
| | | CTTGAAAAAGTGGCACCGAGTCGGTGC |
| 24 | F+E | GTTTaAGAGCTAtgctgGAAAcagcaTAGCAAGTTtAAATAAGGCTAGTCCGTTATCAAC |
| | | TTGAAAAAGTGGCACCGAGTCGGTGC |
| 25 | s12_flip | GTTTAAGAGCTAGAAATAGCAAGTTTAAATAAGGCTAGTCCGTTATCAGCGTGAA |
| | | AACGCGGCACCGAGTCGGTGC |
| 26 | TetraLoop_ | GTTTAAGAGCTAcGAAAgTAGCAAGTTTAAATAAGGCTAGTCCGTTATCAACTTGA |
| | L0 | AAAAGTGGCACCGAGTCGGTGC |
| 27 | TetraLoop_ | GTTTAAGAGCTAccGAAAggTAGCAAGTTTAAATAAGGCTAGTCCGTTATCAACTT |
| | L1 | GAAAAAGTGGCACCGAGTCGGTGC |
| 28 | TetraLoop_ | GTTTAAGAGCTAcaGAAAtgTAGCAAGTTTAAATAAGGCTAGTCCGTTATCAACTTG |
| | L2 | AAAAAGTGGCACCGAGTCGGTGC |
| 29 | TetraLoop_ | GTTTAAGAGCTAcgGAAAtgTAGCAAGTTTAAATAAGGCTAGTCCGTTATCAACTTG |
| | L3 | AAAAAGTGGCACCGAGTCGGTGC |
| 30 | TetraLoop_ | GTTTAAGAGCTAaGAAAtTAGCAAGTTTAAATAAGGCTAGTCCGTTATCAACTTGA |
| | L4 | AAAAGTGGCACCGAGTCGGTGC |
| 31 | TetraLoop_ | GTTTAAGAGCTAacGAAAgtTAGCAAGTTTAAATAAGGCTAGTCCGTTATCAACTTG |
| | L5 | AAAAAGTGGCACCGAGTCGGTGC |
| 32 | TetraLoop_ | GTTTAAGAGCTAaaGAAAttTAGCAAGTTTAAATAAGGCTAGTCCGTTATCAACTTG |
| | L6 | AAAAAGTGGCACCGAGTCGGTGC |
| 33 | TetraLoop_ | GTTTAAGAGCTAagGAAAttTAGCAAGTTTAAATAAGGCTAGTCCGTTATCAACTTG |
| | L7 | AAAAAGTGGCACCGAGTCGGTGC |
| 34 | TetraLoop_ | GTTTAAGAGCTAcccGAAAgggTAGCAAGTTTAAATAAGGCTAGTCCGTTATCAACT |
| | L8 | TGAAAAAGTGGCACCGAGTCGGTGC |
| 35 | TetraLoop_ | GTTTAAGAGCTAccacGAAAgtggTAGCAAGTTTAAATAAGGCTAGTCCGTTATCAAC |
| | L9 | TTGAAAAAGTGGCACCGAGTCGGTGC |
| 36 | TetraLoop_ | GTTTAAGAGCTAccaacGAAAgttggTAGCAAGTTTAAATAAGGCTAGTCCGTTATCAA |
| | L10 | CTTGAAAAAGTGGCACCGAGTCGGTGC |
| 37 | TetraLoop_ | GTTTAAGAGCTAccacacGAAAgtgtggTAGCAAGTTTAAATAAGGCTAGTCCGTTATC |
| | L11 | AACTTGAAAAAGTGGCACCGAGTCGGTGC |
| 38 | Loop2_L0 | GTTTAAGAGCTAGAAATAGCAAGTTTAAATAAGGCTAGTCCGTTATCAACTTcGA |
| | | AAgAAGTGGCACCGAGTCGGTGC |
| 39 | Loop2_L1 | GTTTAAGAGCTAGAAATAGCAAGTTTAAATAAGGCTAGTCCGTTATCAACTTccGA |
| | | AAggAAGTGGCACCGAGTCGGTGC |
| 40 | Loop2_L2 | GTTTAAGAGCTAGAAATAGCAAGTTTAAATAAGGCTAGTCCGTTATCAACTTcaGA |
| | | AAtgAAGTGGCACCGAGTCGGTGC |
| 41 | Loop2_L3 | GTTTAAGAGCTAGAAATAGCAAGTTTAAATAAGGCTAGTCCGTTATCAACTTcgGA |
| | | AAtgAAGTGGCACCGAGTCGGTGC |
| 42 | Loop2_L4 | GTTTAAGAGCTAGAAATAGCAAGTTTAAATAAGGCTAGTCCGTTATCAACTTaGA |
| | | AAtAAGTGGCACCGAGTCGGTGC |
| 43 | Loop2_L5 | GTTTAAGAGCTAGAAATAGCAAGTTTAAATAAGGCTAGTCCGTTATCAACTTacGA |
| | | AAgtAAGTGGCACCGAGTCGGTGC |
| 44 | Loop2_L6 | GTTTAAGAGCTAGAAATAGCAAGTTTAAATAAGGCTAGTCCGTTATCAACTTaaGA |
| | | AAttAAGTGGCACCGAGTCGGTGC |
| 45 | Loop2_L7 | GTTTAAGAGCTAGAAATAGCAAGTTTAAATAAGGCTAGTCCGTTATCAACTTagGA |
| | | AAttAAGTGGCACCGAGTCGGTGC |
| 46 | Loop2_L8 | GTTTAAGAGCTAGAAATAGCAAGTTTAAATAAGGCTAGTCCGTTATCAACTTcccG |
| | | AAAgggAAGTGGCACCGAGTCGGTGC |
| 47 | Loop2_L9 | GTTTAAGAGCTAGAAATAGCAAGTTTAAATAAGGCTAGTCCGTTATCAACTTccacG |
| | | AAAgtggAAGTGGCACCGAGTCGGTGC |
| 48 | Loop2_L10 | GTTTAAGAGCTAGAAATAGCAAGTTTAAATAAGGCTAGTCCGTTATCAACTTecaac |
| | | GAAAgttggAAGTGGCACCGAGTCGGTGC |
| 49 | Loop2_L11 | GTTTAAGAGCTAGAAATAGCAAGTTTAAATAAGGCTAGTCCGTTATCAACTTecaca |
| | | cGAAAgtgtggAAGTGGCACCGAGTCGGTGC |
| 50 | Loop3_L0 | GTTTAAGAGCTAGAAATAGCAAGTTTAAATAAGGCTAGTCCGTTATCAACTTGAA |
| | | AAAGTGGCACCGcAGTgCGGTGC |
| 51 | Loop3_L1 | GTTTAAGAGCTAGAAATAGCAAGTTTAAATAAGGCTAGTCCGTTATCAACTTGAA |
| | | AAAGTGGCACCGccAGTggCGGTGC |
| 52 | Loop3_L2 | GTTTAAGAGCTAGAAATAGCAAGTTTAAATAAGGCTAGTCCGTTATCAACTTGAA |
| | | AAAGTGGCACCGcaAGTtgCGGTGC |
| 53 | Loop3_L3 | GTTTAAGAGCTAGAAATAGCAAGTTTAAATAAGGCTAGTCCGTTATCAACTTGAA |
| | | AAAGTGGCACCGcgAGTtgCGGTGC |
| 54 | Loop3_L4 | GTTTAAGAGCTAGAAATAGCAAGTTTAAATAAGGCTAGTCCGTTATCAACTTGAA |
| | | AAAGTGGCACCGaAGTtCGGTGC |
| 55 | Loop3_L5 | GTTTAAGAGCTAGAAATAGCAAGTTTAAATAAGGCTAGTCCGTTATCAACTTGAA |
| | | AAAGTGGCACCGacAGTgtCGGTGC |
| 56 | Loop3_L6 | GTTTAAGAGCTAGAAATAGCAAGTTTAAATAAGGCTAGTCCGTTATCAACTTGAA |
| | | AAAGTGGCACCGaaAGTttCGGTGC |
| 57 | Loop3_L7 | GTTTAAGAGCTAGAAATAGCAAGTTTAAATAAGGCTAGTCCGTTATCAACTTGAA |
| | | AAAGTGGCACCGagAGTttCGGTGC |
| 58 | Loop3_L8 | GTTTAAGAGCTAGAAATAGCAAGTTTAAATAAGGCTAGTCCGTTATCAACTTGAA |
| | | AAAGTGGCACCGcccAGTgggCGGTGC |
| 59 | Loop3_L9 | GTTTAAGAGCTAGAAATAGCAAGTTTAAATAAGGCTAGTCCGTTATCAACTTGAA |
| | | AAAGTGGCACCGccacAGTgtggCGGTGC |
| 60 | Loop3_L10 | GTTTAAGAGCTAGAAATAGCAAGTTTAAATAAGGCTAGTCCGTTATCAACTTGAA |
| | | AAAGTGGCACCGccaacAGTgttggCGGTGC |
| 61 | Loop3_L11 | GTTTAAGAGCTAGAAATAGCAAGTTTAAATAAGGCTAGTCCGTTATCAACTTGAA |
| | | AAAGTGGCACCGccacacAGTgtgtggCGGTGC |

### Nucleic Acid Moieties

[0381] In some embodiments, the PEgRNA comprises one or more nucleic acid moieties (e.g., hairpin, pseudoknot, quadruplex, tRNA sequence, aptamer) in addition to the spacer, gRNA core, primer binding site, and editing template. In some embodiments such nucleic acid moieties are positioned on the 3′ end of the PEgRNA.

[0382] In some embodiments, the nucleic acid moiety comprise a hairpin. In some embodiments, a hairpin is a nucleic acid secondary structure formed by intramolecular base pairing between a two regions of the same strand, which are typically complementary in nucleotide sequence when read in opposite directions. The two regions base-pair to form a double helix that ends in an unpaired loop. As described herein, the hairpin may be between 5 and 50 nucleotides in length, between 10 and 40 nucleotides in length, or at least 15 and 30 nucleotides in length. The hairpin may be at least 10 nucleotides in length, at least 15 nucleotides in length, at least 20 nucleotides in length, at least 25 nucleotides in length, or at least 30 nucleotides in length. In some embodiments, the hairpin is 14 nucleotides in length. In some embodiments, the hairpin is 18 nucleotides in length. In some embodiments, the hairpin is 22 nucleotides in length. In some embodiments, the hairpin comprises 2, 3, 4, 5, 6, 7, 8, 9, 10, 11, 12, 13, 14, 15 or more contiguous complementary base pairs. In some embodiments, the hairpin comprises 4, 5, 6, 7, 8, 9, or 10 contiguous complementary base pairs. In some embodiments, the hairpin comprises 4-8 contiguous complementary base pairs. In some embodiments, the hairpin comprises 5 contiguous complementary base pairs. In some embodiments, the hairpin comprises 7 contiguous complementary base pairs.

[0383] In some embodiments, the nucleic acid moiety comprises a pseudoknot. As used herein, a pseudoknot, includes, but is not limited to a nucleic acid secondary structure containing at least two stem-loop structures in which half of one stem is intercalated between the two halves of another stem. Several distinct folding topologies of pseudoknots exist, including, for example, the H type. In the H-type fold, the bases in the loop of a hairpin form intramolecular pairs with bases outside of the stem. This causes the formation of a second stem and loop, resulting in a pseudoknot with two stems and two loops. As described herein, the pseudoknot may be between 5 and 50 nucleotides in length, between 10 and 40 nucleotides in length, or at least 15 and 30 nucleotides in length. The hairpin may be at least 10 nucleotides in length, at least 15 nucleotides in length, at least 20 nucleotides in length, at least 25 nucleotides in length, or at least 30 nucleotides in length. In some embodiments, the pseudoknot is 22 nucleotides in length.

[0384] In some embodiments, the nucleic acid moiety comprises a quadruplex. In some embodiments, quadruplexes are noncanonical four-stranded, nucleic acid secondary structures that can be formed, in some contexts, in guanine-rich or cysteine-rich DNA and RNA sequences. As described herein, the quadruplexes may be between 5 and 50 nucleotides in length, between 10 and 40 nucleotides in length, or at least 15 and 30 nucleotides in length. The hairpin may be at least 10 nucleotides in length, at least 15 nucleotides in length, at least 20 nucleotides in length, at least 25 nucleotides in length, or at least 30 nucleotides in length. In some embodiments, the quadruplex is 18 nucleotides in length. In some embodiments, the quadruplex is rich in Guanine (a G-quadruplex). In some embodiments, the quadruplex is rich in Cytosine (a C-quadruplex).

[0385] In some embodiments, the nucleic acid moiety comprises an aptamer. In some embodiments, an aptamer comprises a short, single-stranded nucleic acid oligomer that can bind to a specific target molecule. Aptamers may assume a variety of shapes due to their tendency to form helices and single-stranded loops. As described herein, the aptamer may be between 5 and 50 nucleotides in length, between 10 and 40 nucleotides in length, or at least 15 and 30 nucleotides in length. The hairpin may be at least 10 nucleotides in length, at least 15 nucleotides in length, at least 20 nucleotides in length, at least 25 nucleotides in length, or at least 30 nucleotides in length. In some embodiments, the aptamer is 19 nucleotides in length. In some embodiments, the aptamer is 33 nucleotides in length.

[0386] In some embodiments, the nucleic acid moiety comprises a tRNA sequence. A tRNA sequence may be long (e.g., at least 25 nucleotides, at least 30 nucleotides, at least 35 nucleotides, at least 40 nucleotides, at least 45 nucleotides, at least 50 nucleotides, at least 55 nucleotides, at least 60 nucleotides, at least 65 nucleotides, at least 70 nucleotides, or at least 75 nucleotides) In some embodiments, a tRNA sequence may be short (less than 25 nucleotides, less than 20 nucleotides, less than 15 nucleotides, or less than 10 nucleotides). As described herein, the tRNA sequences may be between 5 and 80 nucleotides in length, between 10 and 70 nucleotides in length, or at least 15 and 60 nucleotides in length. The hairpin may be at least 10 nucleotides in length, at least 15 nucleotides in length, at least 20 nucleotides in length, at least 25 nucleotides in length, at least 30 nucleotides in length, at least 40 nucleotides in length, at least 50 nucleotides in length, at least 60 nucleotides in length, or at least 70 nucleotides in length. In some embodiments, the aptamer is 18 nucleotides in length. In some embodiments, the aptamer is 61 nucleotides in length.

[0387] In some embodiments, the RNA scaffold described herein comprises an aptamer that binds to an adapter protein described herein.

[0388] Exemplary moieties can be found in Table 7. A person of skill in the art would appreciate that the present disclosure is not limited by the sequences and structures in Table 7 as the configurations in Table 7 are examples of a broader class of moieties included in the present disclosure.

[0389] In some embodiments, the one or more nucleic acid moieties comprise a hairpin (e.g., hairpin comprising a region of self-complementarity, optionally wherein the region of self-complementary comprises 2, 3, 4, 5, 6, 7, 8, 9, 10 or more contiguous complementary base pairs), a quadruplex (e.g., a G-quadruplex or a C-quadruplex, optionally wherein the G-quadruplex or the C-quadruplex is derived from a VEGF gene promoter), a tRNA sequence (e.g., a tRNA sequence, optionally wherein the tRNA sequence is a tRNA (Proline) sequence), an aptamer (e.g., an aptamer derived from a viral protein-binding sequence, optionally wherein the aptamer comprises a viral reverse transcriptase recruitment sequence, optionally wherein the aptamer comprises a MS2 protein binding sequence or a Moloney Murine leukemia (MMLV) reverse transcriptase recruitment sequence), and/or a pseudoknot (e.g. pseudoknot is derived form a potato roll leaf virus (PLRV)), or any combination thereof.

[0390] In some embodiments, the one or more nucleic acid moieties comprise a structure derived form a replication recognition sequence of a retrovirus. In some embodiments, the nucleic acid moiety comprises a sequence derived from a replication recognition sequence of a Moloney Murine leukemia virus (MMLV). In some embodiments, the one or more nucleic acid moieties comprise a nucleic acid sequence selected from SEQ ID NOs 12-15.

[0391] In some embodiments, the one or more nucleic acid moieties comprises a hairpin. In some embodiments, the hairpin comprises a sequence of any one of SEQ ID Nos: 1-3 or 5-7.

[0392] In some embodiments, the one or more nucleic acid moieties comprises a pseudoknot. In some embodiments, the pseudoknot is derived from potato roll-leaf virus. In some embodiments, the pseudoknot comprises the sequence of SEQ ID NO: 4. In some embodiments, the one or more nucleic acid moieties comprises a MS2 hairpin. In some embodiments, the nucleotide sequence of the MS2 hairpin (or also referred to as the “MS2 aptamer”) is: GCCAACATGAGGATCACCCATGTCTGCAGGGCC (SEQ ID NO: 4446). In some embodiments, the nucleotide sequence of the MS2 aptamer comprises the sequence of SEQ ID NO: 9. In some embodiments, a MS2 coat protein (MCP) recognizes the MS2 hairpin. In some embodiments, the amino acid sequence of the MCP is:

(SEQ ID NO: 4447)
GSASNFTQFVLVDNGGTGDVTVAPSNFANGVAEWISSNSRSQAYKVTCS
VRQSSAQNRKYTIKVEVPKVATQTVGGEELPVAGWRSYLNMELTIPIFA
TNSDCELIVKAMQGLLKDGNPIPSAIA ANSGIY.

[0393] In some embodiments, the one or more nucleic acid moieties comprises a G-quadruplex or a C-quadruplex. In some embodiments, the one or more nucleic acid moieties comprises a quadruplex from a VEGF gene promoter. In some embodiments, the quadruplex comprises the sequence of SEQ ID NO: 10 or 11.

[0394] In some embodiments, the PEgRNA comprises one or more nucleic acid moieties at its 3′ end. In some embodiments, the PEgRNA comprises one or more nucleic acid moieties at its 5′ end.

TABLE 6
Exemplary Nucleic Acid Motif Sequences

| SEQ | | | | |
|---|---|---|---|---|
| ID | | | | Motif |
| NO: | Name | Name description | Motif Sequence | length |
| 1 | hp_1 | hairpin 1 | CGCGTCTCTACGTGGGGGC | 22 |
| | | | CCG | |
| 2 | hp_1 | hairpin 1 | CGCGTCTCTACGTGGGGGC | 22 |
| | | | GCG | |
| 3 | hp_3 | hairpin 3 | GGCGCGAAAGCGCC | 14 |
| 4 | PLRVPLRV_22 | potato roll leaf virus | GCGGCACCGTCCGCCCAAA | 22 |
| | | pseudoknot | CGG | |
| 5 | hp_5 | hairpin 5 | GCCCGGCGAAAGCCGGGC | 18 |
| 6 | hp_4 | hairpin 4 | GCCCGGCTTCGGCCGGGC | 18 |
| 7 | hp_2 | hairpin 2 | GGCGCTTCGGCGCC | 14 |
| 8 | MMLV-RT | MML Vaptamer sequence | TTACCACGCGCTCTTAACTG | 33 |
| | aptamer | that can recruit MMLV | CTAGCGCCATGGC | |
| | | RT | | |
| 9 | MS2 | MS2 protein binding | ACATGAGGATCACCCATGT | 19 |
| | | sequence. | | |
| 10 | G quad/ | G-quadruplex in VEGF | GGGCGGGCCGGGGGGGG | 18 |
| | G4_VEGF | promoter | | |
| 11 | C quad/ | C-quadruplex in VEGF | CCCCGCCCCGGCCGCCCC | 18 |
| | IM_VEGF | promoter | | |
| 12 | tRNA_PBS_long | MMLV endogenous | GCTCCTCTGATTGACTACCC | 61 |
| | | binding for replication | GTCAGCGGGGGTCTTTTGG | |
| | | | GGGCTCGTCCGGGATCGGG | |
| | | | AGT | |
| 13 | tRNA_PBS | MMLV endogenous | ACTCCCGATCCCGGACGAG | 61 |
| | long_RC | binding for replication | CCCCCAAAAGACCCCCGCT | |
| | | (reverse complement) | GACGGGTAGTCAATCAGAG | |
| | | | GAGC | |
| 14 | tRNA_PBS_short | MMLV endogenous | TGGGGGCTCGTCCGGGAT | 18 |
| | | binding for replication | | |
| 15 | tRNA_PBS | MMLV endogenous | ATCCCGGACGAGCCCCCA | 18 |
| | short_RC | binding for | | |
| | | replication | | |
| | | (reverse complement) | | |

TABLE 7
Exemplary Nucleic Acid Motif Structural Configurations

| | SEQ | Structural |
|---|---|---|
| Moiety Type | ID NO: | Configuration |
| Hairpin (hp_1) | 1 | [symbol] |
| Pseudoknot (PLRV_22) | 4 | [symbol] |
| tRNA sequence (short) | 14 | [symbol] |
| tRNA sequence (long) | 12 | [symbol] |
| Aptamer (MMLV-RT) | 8 | [symbol] |
| Aptamer (MS2) | 4 | [symbol] |
| Quadruplex (G quad/G4_VEGF) | 8774 | [symbol] |
| Quadruplex (C quad/iM_VEGF) | | [symbol] |

### Tag Sequences

[0395] In some embodiments, the PEgRNA comprises a tag sequence in addition to the spacer, gRNA core, primer binding site, and editing template. In some embodiments, the tag sequence comprises a region of complementarity to the editing template. In some embodiments, the tag sequence comprises a region of complementarity to the PBS. In some embodiments, the tag sequence comprises a region of complementarity to the editing template and/or the PBS. In some embodiments, the tag sequence comprises a region of complementarity to the editing template and does not have substantial complementarity to the PBS. In some embodiments, the tag sequence comprises a region of complementarity to the editing template and does not have complementarity to the PBS. In some embodiments, the tag sequence and the editing template each comprises a region of complementarity to each other, wherein the 3′ end of the region of complementarity in the editing template is at a position 1, 2, 3, 4, 5, 6, 7, 8, 9, 10, 11, 12, 13, 14, 15, 16 or more bases 5′ of the 3′ half of the editing template. In some embodiments, the region of complementarity in the tag sequence is at a 5′ portion of the tag sequence. In some embodiments, the tag sequence does not have substantial complementarity to the spacer. In some embodiments, the tag does not have complementarity to the spacer. In some embodiments, the tag sequence is 1, 2, 3, 4, 5, 6, 7, 8, 9, 10, 11, 12, 13, 14, 15, 16 nucleotides in length. In some embodiments, the tag sequence is at least 4, at least 6, at least 8 nucleotides in length. Exemplary Tag sequences can be found in U.S. Patent Application 63/283,076.

### Linkers

[0396] In some embodiments, the PEgRNA comprises a linker. In some embodiments, the linker is: i) immediately 5′ of the one or more nucleic acid moieties, ii) immediately 5′ of the tag sequence, iii) immediately 3′ of the tag sequence, iv) immediately 3′ of the spacer, v) immediately 5′ of the spacer, vi) immediately 3′ of the gRNA core, or vii) immediately 5′ of the gRNA core. In some embodiments, the linker is 1, 2, 3, 4, 5, 6, 7, 8, 9, 10, 11, 12, 13, 14, 15, 16 nucleotides in length. In some embodiments, the linker is 2 to 12 nucleotides in length. In some embodiments, the linker is 5 to 20 nucleotides in length. In some embodiments, the linker is 3 to 10, 3 to 15, 3 to 20, 3 to 25, 3 to 30, 3 to 35, 3 to 40, or 3 to 50 nucleotides in length. In some embodiments, the linker is 8 nucleotides in length. In some embodiments, the linker does not form a secondary structure. In some embodiments, the linker does not have a region of complementarity to the PBS sequence. In some embodiments, the linker does not have a region of complementarity to the editing template. As used herein, a linker can be any chemical group or molecule linking two molecules/moieties, e.g., the components of the PEgRNA.

### LegRNAs

[0397] Also provided herein are legRNAs. In some embodiments, the PEgRNA is a legRNA. As used herein, a “legRNA” is a PEgRNA comprising a spacer, a gRNA core, a PBS, and an editing template (e.g., an RTT sequence), wherein the PBS and the editing template is positioned within the gRNA core. A legRNA disclosed herein may comprise any 3′ moiety or other modification disclosed herein.

[0398] In certain embodiments, the legRNAs comprise in 5′ to 3′ order: i) a spacer that comprises a region of complementarity to a search target sequence in target strand of a double stranded target DNA; ii) a 5′ part of a guide RNA (gRNA) core; iii) an editing template that comprises an intended edit compared to the double stranded target DNA; iv) a primer binding site (PBS) that comprises a region of complementarity to a region upstream of a nick site in a non-target strand of the double stranded target DNA; and v) a 3′ part of a gRNA core. In some embodiments, the 5′ part of the gRNA core comprises a direct repeat, a first stem loop, and a 5′ half of a second stem loop. In some embodiments, the 3′ part of the gRNA core comprises a 3′ half of a second stem loop and a third stem loop. In some embodiments, the 5′ part of the gRNA core and the 3′ part of the gRNA core are “split” at between the 30^{th} and the 31^{st}, the 31^{st} and the 32^{nd}, the 32^{nd} and the 33^{rd}, the 33^{rd} and the 34^{th}, the 34^{th} and the 35^{th}, the 35^{th} and the 36^{th}, the 36^{th} and the 37^{th}, the 37^{th} and the 38^{th}, the 38^{th} and the 39^{th}, or the 39^{th} and 40^{th} nucleotides of the full gRNA core sequence, wherein the position numbering of the nucleotides is as set forth in SEQ ID NO: 16. In some embodiments, the 5′ part of the gRNA core and the 3′ part of the gRNA core are “split” at between the 50^{th} and the 51^{st}, the 51^{st} and the 52^{nd}, the 52^{nd} and the 55^{rd}, the 55^{rd} and the 54^{th}, the 54^{th} and the 55^{th}, the 55^{th} and the 56^{th}, the 56^{th} and the 57^{th}, the 57^{th} and the 58^{th}, the 58^{th} and the 59^{th}, or the 59^{th} and 60^{th} nucleotides of the full gRNA core sequence, wherein the position numbering of the nucleotides is as set forth in SEQ ID NO: 16. In some embodiments, the 5′ part of the gRNA core and the 3′ part of the gRNA core are split between the 54^{th} and the 55^{th} nucleotides of the full gRNA core sequence, wherein the position numbering of the nucleotides is as set forth in SEQ ID NO: 16. In some embodiments, the 5′ part of the gRNA core comprises the sequence GTTTAAGAGCTAGAAATAGCAAGTTTAAATAAGGCTAGTCCGTTATCAGCGTGA (SEQ ID NO: 8775). In some embodiments, the 3′ part of the gRNA core comprises the sequence AAACGCGGCACCGAGTCGGTGC (SEQ ID NO: 8776).

[0399] Exemplary legRNA are found in U.S. Patent Application 63/283,076.

[0400] In some embodiments, the PEgRNA further comprises a tag sequence that comprises a region of complementarity to the PBS and/or the editing template.

[0401] The legRNA may comprise a tag sequence, an aptamer, a hairpin, a quadruplex, a tRNA, a pseudoknot, a linker, or any nucleic acid moieties as described herein. In some embodiments, the legRNA comprises a linker. In some embodiments, the linker is: i) immediately 5′ of the one or more nucleic acid moieties, ii) immediately 5′ of the tag sequence, iii) immediately 3′ of the tag sequence, iv) immediately 3′ of the spacer, v) immediately 5′ of the spacer, vi) immediately 3′ of the gRNA core, and/or vii) immediately 5′ of the gRNA core. In some embodiments, the linker is 1, 2, 3, 4, 5, 6, 7, 8, 9, 10, 11, 12, 13, 14, 15, 16 nucleotides in length. In some embodiments, the linker does not form a secondary structure. In some embodiments, the linker does not have a region of complementarity to the PBS sequence. In some embodiments, the linker does not have a region of complementarity to the editing template. As used herein, a linker can be any chemical group or a molecule linking two molecules or moieties, e.g., the components of the legRNA.

Extended gRNA Cores for Split Synthesis

[0402] In some embodiments, a PEgRNA comprises a gRNA core that comprises one or more nucleotide insertions compared to a wild type CRISPR guide RNA scaffold sequence, i.e. an extended in length gRNA core.

[0403] In some embodiments, the gRNA core comprises insertion of one or more nucleotides in the direct repeat compared to a wild type CRISPR guide RNA scaffold sequence as set forth in SEQ ID NO: 16. In some embodiments, the gRNA core comprises insertion of one or more nucleotides in the second stem loop compared to a wild type CRISPR guide RNA scaffold sequence as set forth in SEQ ID NO: 16.

[0404] Components of a PEgRNA, e.g., an extended PEgRNA, may be synthesized by split synthesis, which refers to synthesizing two (or more) portions of a PEgRNA (e.g., a 5′ half of the PEgRNA and a 3′ half of the PEgRNA) separately and ligating the first half to a second half to form a full length PEgRNA. Exemplary gRNA core sequences for split synthesis are shown in U.S. Patent Application 63/283,076.

[0405] In certain embodiments, PEgRNAs provided herein comprise: i) a first sequence comprising a spacer that comprises a region of complementarity to a search target sequence in target strand of a double stranded target DNA, and a first half of a gRNA core; and ii) a second sequence comprising a second half of the gRNA core, an editing template that comprises an intended edit compared to the double stranded target DNA; a primer binding site (PBS) that comprises a region of complementarity to a region upstream of a nick site in a non-target strand of the double stranded target DNA; and, wherein the gRNA core comprises a direct repeat, a first stem loop, and a second stem loop.

[0406] In certain embodiments, PEgRNAs provided herein comprise i) a first sequence comprising an editing template that comprises an intended edit compared to the double stranded target DNA; a primer binding site (PBS) that comprises a region of complementarity to a region upstream of a nick site in a non-target strand of the double stranded target DNA; a spacer that comprises a region of complementarity to a search target sequence in target strand of a double stranded target DNA; and a first half of a gRNA core; and ii) a second sequence comprising a second half of a gRNA core, wherein the gRNA core comprises a direct repeat, a first stem loop, and a second stem loop.

[0407] In some embodiments, the first sequence is on a first RNA molecule and the second sequence is on a second RNA molecule. In some embodiments, the spacer and the first sequence and the second sequence are on the same RNA molecule. In some embodiments, the first half of the gRNA core and the second half of the gRNA core are selected from the paired first half gRNA core sequences and second half gRNA sequences provided in U.S. Patent Application 63/283,076.

[0408] It should be appreciated that the first half and second half of the gRNA core may or may not be equal in length. In some embodiments, the first half of the gRNA core is at least five, at least 10, at least 15, at least 20 nucleotides, at least 25 nucleotides, at least 30 nucleotides, at least 35 nucleotides, at least 40 nucleotides, at least 45 nucleotides, at least 50 nucleotides, at least 55 nucleotides, at least 60 nucleotides, at least 65 nucleotides, at least 70 nucleotides, or at least 75 nucleotides in length. In some embodiments, the second half of the gRNA core is at least five, at least 10, at least 15, at least 20 nucleotides, at least 25 nucleotides, at least 30 nucleotides, at least 35 nucleotides, at least 40 nucleotides, at least 45 nucleotides, at least 50 nucleotides, at least 55 nucleotides, at least 60 nucleotides, at least 65 nucleotides, at least 70 nucleotides, or at least 75 nucleotides in length.

[0409] In some embodiments, the first half of the gRNA core is at least 80%, at least 85%, at least 90%, at least 95%, at least 99% identical to a sequence provided in U.S. Patent Application 63/283,076. In some embodiments, the first half of the gRNA core is identical to a sequence provided in U.S. Patent Application 63/283,076. In some embodiments, the second half of the gRNA core is at least 80%, at least 85%, at least 90%, at least 95%, at least 99% identical to a sequence provided in U.S. Patent Application 63/283,076. In some embodiments, the second half of the gRNA core is identical to a sequence provided in U.S. Patent Application 63/283,076.

[0410] As previously discussed, the gRNA core may comprise a direct repeat and/or one or multiple stem loops. In some embodiments, gRNA cores synthesize using split synthesis comprise a first half of a gRNA core comprising a first half of the direct repeat and a second half of a gRNA core comprising the second half of the direct repeat. In some embodiments, gRNA cores synthesizes using split synthesis comprises a first half of a gRNA core comprising a first half of the second stem loop and a second half of a gRNA core comprising the second half of the second stem loop.

### Nucleotide Editing

[0411] Provided herein are exemplary PEgRNAs with modifications disclosed herein for nucleotide editing. An intended nucleotide edit in an editing template of a PEgRNA may comprise various types of alterations as compared to the target gene sequence. In some embodiments, the nucleotide edit is a single nucleotide substitution as compared to the target gene sequence. In some embodiments, the nucleotide edit is a deletion as compared to the target gene sequence. In some embodiments, the nucleotide edit is an insertion as compared to the target gene sequence. In some embodiments, the editing template comprises one to ten intended nucleotide edits as compared to the target gene sequence. In some embodiments, the editing template comprises one or more intended nucleotide edits as compared to the target gene sequence. In some embodiments, the editing template comprises two or more intended nucleotide edits as compared to the target gene sequence. In some embodiments, the editing template comprises three or more intended nucleotide edits as compared to the target gene sequence. In some embodiments, the editing template comprises four or more, five or more, or six or more intended nucleotide edits as compared to the target gene sequence. In some embodiments, the editing template comprises two single nucleotide substitutions, insertions, deletions, or any combination thereof, as compared to the target gene sequence. In some embodiments, the editing template comprises three single nucleotide substitutions, insertions, deletions, or any combination thereof, as compared to the target gene sequence. In some embodiments, the editing template comprises four, five, or six single nucleotide substitutions, insertions, deletions, or any combination thereof, as compared to the target gene sequence. In some embodiments, a nucleotide substitution comprises an adenine (A)-to-thymine (T) substitution. In some embodiments, a nucleotide substitution comprises an A-to-guanine (G) substitution. In some embodiments, a nucleotide substitution comprises an A-to-cytosine (C) substitution. In some embodiments, a nucleotide substitution comprises a T-A substitution. In some embodiments, a nucleotide substitution comprises a T-G substitution. In some embodiments, a nucleotide substitution comprises a T-C substitution. In some embodiments, a nucleotide substitution comprises a G-to-A substitution. In some embodiments, a nucleotide substitution comprises a G-to-T substitution. In some embodiments, a nucleotide substitution comprises a G-to-C substitution. In some embodiments, a nucleotide substitution comprises a C-to-A substitution. In some embodiments, a nucleotide substitution comprises a C-to-T substitution. In some embodiments, a nucleotide substitution comprises a C-to-G substitution.

[0412] In some embodiments, a nucleotide insertion is at least 5 nucleotides, at least 6 nucleotides, at least 7 nucleotides, at least 8 nucleotides, at least 9 nucleotides, at least 10 nucleotides, at least 11 nucleotides, at least 12 nucleotides, at least 13 nucleotides, at least 14 nucleotides, at least 15 nucleotides, at least 16 nucleotides, at least 17 nucleotides, at least 18 nucleotides, at least 19 nucleotides, or at least 20 nucleotides in length. In some embodiments, a nucleotide insertion is from 1 to 2 nucleotides, from 1 to 3 nucleotides, from 1 to 4 nucleotides, from 1 to 5 nucleotides, form 2 to 5 nucleotides, from 3 to 5 nucleotides, from 3 to 6 nucleotides, from 3 to 8 nucleotides, from 4 to 9 nucleotides, from 5 to 10 nucleotides, from 6 to 11 nucleotides, from 7 to 12 nucleotides, from 8 to 13 nucleotides, from 9 to 14 nucleotides, from 10 to 15 nucleotides, from 11 to 16 nucleotides, from 12 to 17 nucleotides, from 13 to 18 nucleotides, from 14 to 19 nucleotides, from 15 to 20 nucleotides in length. In some embodiments, a nucleotide insertion is a single nucleotide insertion. In some embodiments, a nucleotide insertion comprises insertion of two nucleotides.

[0413] The editing template of a PEgRNA may comprise one or more intended nucleotide edits, compared to the gene to be edited. Position of the intended nucleotide edit(s) relevant to other components of the PEgRNA, or to particular nucleotides (e.g., mutations) in the target gene may vary. In some embodiments, the nucleotide edit is in a region of the PERNA corresponding to or homologous to the protospacer sequence. In some embodiments, the nucleotide edit is in a region of the PEgRNA corresponding to a region of the gene outside of the protospacer sequence.

[0414] In some embodiments, the position of a nucleotide edit incorporation in the target gene may be determined based on position of the protospacer adjacent motif (PAM). For instance, the intended nucleotide edit may be installed in a sequence corresponding to the protospacer adjacent motif (PAM) sequence. In some embodiments, a nucleotide edit in the editing template is at a position corresponding to the 5′ most nucleotide of the PAM sequence. In some embodiments, a nucleotide edit in the editing template is at a position corresponding to the 3′ most nucleotide of the PAM sequence. In some embodiments, position of an intended nucleotide edit in the editing template may be referred to by aligning the editing template with the partially complementary edit strand of the target gene, and referring to nucleotide positions on the editing strand where the intended nucleotide edit is incorporated. In some embodiments, a nucleotide edit is incorporated at a position corresponding to about 0, 1, 2, 3, 4, 5, 6, 7, 8, 9, 10, 11, 12, 13, 14, 15, 16, 17, 18, 19, 20, 21, 22, 23, 24, 25, 26, 27, 28, 29, 30, 31, 32, 33, 34, 35, 36, 37, 38, 39, or 40 base pairs upstream of the 5′ most nucleotide of the PAM sequence in the edit strand of the target gene. By 0 base pair upstream or downstream of a reference position, it is meant that the intended nucleotide is immediately upstream or downstream of the reference position. In some embodiments, a nucleotide edit is incorporated at a position corresponding to about 0 to 2 base pairs, 0 to 4 base pairs, 0 to 6 base pairs, 0 to 8 base pairs, 0 to 10 base pairs, 2 to 4 base pairs, 2 to 6 base pairs, 2 to 8 base pairs, 2 to 10 base pairs, 2 to 12 base pairs, 4 to 6 base pairs, 4 to 8 base pairs, 4 to 10 base pairs, 4 to 12 base pairs, 4 to 14 base pairs, 6 to 8 base pairs, 6 to 10 base pairs, 6 to 12 base pairs, 6 to 14 base pairs, 6 to 16 base pairs, 8 to 10 base pairs, 8 to 12 base pairs, 8 to 14 base pairs, 8 to 16 base pairs, 8 to 18 base pairs, 10 to 12 base pairs, 10 to 14 base pairs, 10 to 16 base pairs, 10 to 18 base pairs, 10 to 20 base pairs, 12 to 14 base pairs, 12 to 16 base pairs, 12 to 18 base pairs, 12 to 20 base pairs, 12 to 22 base pairs, 14 to 16 base pairs, 14 to 18 base pairs, 14 to 20 base pairs, 14 to 22 base pairs, 14 to 24 base pairs, 16 to 18 base pairs, 16 to 20 base pairs, 16 to 22 base pairs, 16 to 24 base pairs, 16 to 26 base pairs, 18 to 20 base pairs, 18 to 22 base pairs, 18 to 24 base pairs, 18 to 26 base pairs, 18 to 28 base pairs, 20 to 22 base pairs, 20 to 24 base pairs, 20 to 26 base pairs, 20 to 28 base pairs, or 20 to 30 base pairs upstream of the 5′ most nucleotide of the PAM sequence. In some embodiments, the nucleotide edit is incorporated at a position corresponding to 3 base pairs upstream of the 5′ most nucleotide of the PAM sequence. In some embodiments, the nucleotide edit in is incorporated at a position corresponding to 4 base pairs upstream of the 5′ most nucleotide of the PAM sequence. In some embodiments, the nucleotide edit is incorporated at a position corresponding to 5 base pairs upstream of the 5′ most nucleotide of the PAM sequence. In some embodiments, the nucleotide edit in the editing template is at a position corresponding to 6 base pairs upstream of the 5′ most nucleotide of the PAM sequence.

[0415] In some embodiments, an intended nucleotide edit is incorporated at a position corresponding to about 0, 1, 2, 3, 4, 5, 6, 7, 8, 9, 10, 11, 12, 13, 14, 15, 16, 17, 18, 19, 20, 21, 22, 23, 24, 25, 26, 27, 28, 29, 30, 31, 32, 33, 34, 35, 36, 37, 38, 39, or 40 base pairs downstream of the 5′ most nucleotide of the PAM sequence in the edit strand of the target gene. In some embodiments, a nucleotide edit is incorporated at a position corresponding to about 0 to 2 base pairs, 0 to 4 base pairs, 0 to 6 base pairs, 0 to 8 base pairs, 0 to 10 base pairs, 2 to 4 base pairs, 2 to 6 base pairs, 2 to 8 base pairs, 2 to 10 base pairs, 2 to 12 base pairs, 4 to 6 base pairs, 4 to 8 base pairs, 4 to 10 base pairs, 4 to 12 base pairs, 4 to 14 base pairs, 6 to 8 base pairs, 6 to 10 base pairs, 6 to 12 base pairs, 6 to 14 base pairs, 6 to 16 base pairs, 8 to 10 base pairs, 8 to 12 base pairs, 8 to 14 base pairs, 8 to 16 base pairs, 8 to 18 base pairs, 10 to 12 base pairs, 10 to 14 base pairs, 10 to 16 base pairs, 10 to 18 base pairs, 10 to 20 base pairs, 12 to 14 base pairs, 12 to 16 base pairs, 12 to 18 base pairs, 12 to 20 base pairs, 12 to 22 base pairs, 14 to 16 base pairs, 14 to 18 base pairs, 14 to 20 base pairs, 14 to 22 base pairs, 14 to 24 base pairs, 16 to 18 base pairs, 16 to 20 base pairs, 16 to 22 base pairs, 16 to 24 base pairs, 16 to 26 base pairs, 18 to 20 base pairs, 18 to 22 base pairs, 18 to 24 base pairs, 18 to 26 base pairs, 18 to 28 base pairs, 20 to 22 base pairs, 20 to 24 base pairs, 20 to 26 base pairs, 20 to 28 base pairs, or 20 to 30 base pairs downstream of the 5′ most nucleotide of the PAM sequence. In some embodiments, a nucleotide edit is incorporated at a position corresponding to 3 base pairs downstream of the 5′ most nucleotide of the PAM sequence. In some embodiments, a nucleotide edit is incorporated at a position corresponding to 4 base pairs downstream of the 5′ most nucleotide of the PAM sequence. In some embodiments, a nucleotide edit is incorporated at a position corresponding to 5 base pairs downstream of the 5′ most nucleotide of the PAM sequence. In some embodiments, a nucleotide edit is incorporated at a position corresponding to 6 base pairs downstream of the 5′ most nucleotide of the PAM sequence. By “upstream” and “downstream” it is intended to define relevant positions at least two regions or sequences in a nucleic acid molecule orientated in a 5′-to-3′ direction. For example, a first sequence is upstream of a second sequence in a DNA molecule where the first sequence is positioned 5′ to the second sequence. Accordingly, the second sequence is downstream of the first sequence.

[0416] When referred to in the PEgRNA, positions of the one or more intended nucleotide edits may be referred to relevant to components of the PEgRNA. For example, an intended nucleotide edit may be 5′ or 3′ to the PBS. In some embodiments, a PEgRNA comprises the structure, from 5′ to 3′: a spacer, a gRNA core, an editing template, and a PBS. In some embodiments, the intended nucleotide edit is 0, 1, 2, 3, 4, 5, 6, 7, 8, 9, 10, 11, 12, 13, 14, 15, 16, 17, 18, 19, 20, 21, 22, 23, 24, 25, 26, 27, 28, 29, 30, 31, 32, 33, 34, 35, 36, 37, 38, 39, or 40 base pairs upstream to the 5′ most nucleotide of the PBS. In some embodiments, the intended nucleotide edit is 0 to 2 base pairs, 0 to 4 base pairs, 0 to 6 base pairs, 0 to 8 base pairs, 0 to 10 base pairs, 2 to 4 base pairs, 2 to 6 base pairs, 2 to 8 base pairs, 2 to 10 base pairs, 2 to 12 base pairs, 4 to 6 base pairs, 4 to 8 base pairs, 4 to 10 base pairs, 4 to 12 base pairs, 4 to 14 base pairs, 6 to 8 base pairs, 6 to 10 base pairs, 6 to 12 base pairs, 6 to 14 base pairs, 6 to 16 base pairs, 8 to 10 base pairs, 8 to 12 base pairs, 8 to 14 base pairs, 8 to 16 base pairs, 8 to 18 base pairs, 10 to 12 base pairs, 10 to 14 base pairs, 10 to 16 base pairs, 10 to 18 base pairs, 10 to 20 base pairs, 12 to 14 base pairs, 12 to 16 base pairs, 12 to 18 base pairs, 12 to 20 base pairs, 12 to 22 base pairs, 14 to 16 base pairs, 14 to 18 base pairs, 14 to 20 base pairs, 14 to 22 base pairs, 14 to 24 base pairs, 16 to 18 base pairs, 16 to 20 base pairs, 16 to 22 base pairs, 16 to 24 base pairs, 16 to 26 base pairs, 18 to 20 base pairs, 18 to 22 base pairs, 18 to 24 base pairs, 18 to 26 base pairs, 18 to 28 base pairs, 20 to 22 base pairs, 20 to 24 base pairs, 20 to 26 base pairs, 20 to 28 base pairs, or 20 to 30 base pairs upstream to the 5′ most nucleotide of the PBS.

[0417] The corresponding positions of the intended nucleotide edit incorporated in the target gene may also be referred to bases on the nicking position generated by a split prime editor based on sequence homology and complementarity. For example, in embodiments, the distance between the nucleotide edit to be incorporated into the target gene and the nick generated by the split prime editor may be determined when the spacer hybridizes with the search target sequence and the extension arm hybridizes with the editing target sequence. In certain embodiments, the position of the nucleotide edit can be in any position downstream of the nick site on the edit strand (or the PAM strand) generated by the split prime editor, such that the distance between the nick site and the intended nucleotide edit is 0, 1, 2, 3, 4, 5, 6, 7, 8, 9, 10, 11, 12, 13, 14, 15, 16, 17, 18, 19, 20, 21, 22, 23, 24, 25, 26, 27, 28, 29, or 30 nucleotides in length. In some embodiments, the position of the nucleotide edit is 0, 1, 2, 3, 4, 5, 6, 7, 8, 9, 10, 11, 12, 13, 14, 15, 16, 17, 18, 19, 20, 21, 22, 23, 24, 25, 26, 27, 28, 29, or 30 nucleotides upstream of the nick site on the edit strand. In some embodiments, the position of the nucleotide edit is 0, 1, 2, 3, 4, 5, 6, 7, 8, 9, 10, 11, 12, 13, 14, 15, 16, 17, 18, 19, 20, 21, 22, 23, 24, 25, 26, 27, 28, 29, or 30 nucleotides downstream of the nick site on the edit strand. In some embodiments, the position of the nucleotide edit is 0 base pairs from the nick site on the edit strand, that is, the editing position is at the same position as the nick site. As used herein, the distance between the nick site and the nucleotide edit, for example, where the nucleotide edit comprises an insertion or deletion, refers to the 5′ most position of the nucleotide edit for a nick that creates a 3′ free end on the edit strand (i.e., the “near position” of the nucleotide edit to the nick site). Similarly, as used herein, the distance between the nick site and a PAM position edit, for example, where the nucleotide edit comprises an insertion, deletion, or substitution of two or more contiguous nucleotides, refers to the 5′ most position of the nucleotide edit and the 5′ most position of the PAM sequence.

[0418] A PEgRNA may also comprise optional modifiers, e.g., 3′ end modifier region and/or a 5′ end modifier region. In some embodiments, a PERNA comprises at least one nucleotide that is not part of a spacer, a gRNA core, or an extension arm. The optional sequence modifiers could be positioned within or between any of the other regions shown, and not limited to being located at the 3′ and 5′ ends. In certain embodiments, the PEgRNA comprises secondary RNA structure, such as, but not limited to, aptamers, hairpins, stem/loops, toeloops, and/or RNA-binding protein recruitment domains (e.g., the MS2 aptamer which recruits and binds to the MS2cp protein). In some embodiments, a PERNA comprises a short stretch of uracil at the 5′ end or the 3′ end. For example, in some embodiments, a PEgRNA comprising a 3′ extension arm comprises a “UUU” sequence at the 3′ end of the extension arm. In some embodiments, a PERNA comprises a toeloop sequence at the 3′ end. In some embodiments, the PEgRNA comprises a 3′ extension arm and a toeloop sequence at the 3′ end of the extension arm. In some embodiments, the PERNA comprises a 5′ extension arm and a toeloop sequence at the 5′ end of the extension arm. In some embodiments, the PEgRNA comprises a toeloop element having the sequence 5′-GAAANNNNN-3′, wherein N is any nucleobase. In some embodiments, the secondary RNA structure is positioned within the spacer. In some embodiments, the secondary structure is positioned within the extension arm. In some embodiments, the secondary structure is positioned within the gRNA core. In some embodiments, the secondary structure is positioned between the spacer and the gRNA core, between the gRNA core and the extension arm, or between the spacer and the extension arm. In some embodiments, the secondary structure is positioned between the PBS and the editing template. In some embodiments the secondary structure is positioned at the 3′ end or at the 5′ end of the PEgRNA. In some embodiments, the PEgRNA comprises a transcriptional termination signal at the 3′ end of the PEgRNA. In addition to secondary RNA structures, the PEgRNA may comprise a chemical linker or a poly(N) linker or tail, where “N” can be any nucleobase. In some embodiments, the chemical linker may function to prevent reverse transcription of the gRNA core.

[0419] In some embodiments, a prime editing system or composition further comprises a nick guide polynucleotide, such as a nick guide RNA (ngRNA). Without wishing to be bound by any particular theory, the non-edit strand of a double stranded target DNA in the target gene may be nicked by a CRISPR-Cas nickase directed by an ngRNA. In some embodiments, the nick on the non-edit strand directs endogenous DNA repair machinery to use the edit strand as a template for repair of the non-edit strand, which may increase efficiency of prime editing. In some embodiments, the non-edit strand is nicked by a split prime editor localized to the non-edit strand by the ngRNA. Accordingly, also provided herein are PERNA systems comprising at least one PERNA and at least one ngRNA.

[0420] In some embodiments, the ngRNA is a guide RNA which contains a variable spacer sequence and a guide RNA scaffold or core region that interacts with the DNA binding domain, e.g., Cas9 of the split prime editor. In some embodiments, the ngRNA comprises a spacer sequence (referred to herein as an ng spacer, or a second spacer) that is substantially complementary to a second search target sequence (or ng search target sequence), which is located on the edit strand, or the non-target strand. Thus, in some embodiments, the ng search target sequence recognized by the ng spacer and the search target sequence recognized by the spacer sequence of the PEgRNA are on opposite strands of the double stranded target DNA of target gene, e.g., the gene. A prime editing system or complex comprising a ngRNA may be referred to as a “PE3” prime editing system or PE3 prime editing complex.

[0421] In some embodiments, the ng search target sequence is located on the non-target strand, within 10 base pairs to 100 base pairs of an intended nucleotide edit incorporated by the PEgRNA on the edit strand. In some embodiments, the ng target search target sequence is within 10 bp, 20 bp, 30 bp, 40 bp, 50 bp, 60 bp, 70 bp, 80 bp, 90 bp, 91 bp, 92 bp, 93 bp, 94 bp, 95 bp, 96 bp, 97 bp, 98 bp, 99 bp, or 100 bp of an intended nucleotide edit incorporated by the PEgRNA on the edit strand. In some embodiments, the 5′ ends of the ng search target sequence and the PEgRNA search target sequence are within 1, 2, 3, 4, 5, 6, 7, 8, 9, or 10 bp apart from each other. In some embodiments, the 5′ ends of the ng search target sequence and the PEgRNA search target sequence are within 10 bp, 20 bp, 30 bp, 40 bp, 50 bp, 60 bp, 70 bp, 80 bp, 90 bp, 91 bp, 92 bp, 93 bp, 94 bp, 95 bp, 96 bp, 97 bp, 98 bp, 99 bp, or 100 bp apart from each other.

[0422] In some embodiments, an ng spacer sequence is complementary to, and may hybridize with the second search target sequence only after an intended nucleotide edit has been incorporated on the edit strand, by the editing template of a PEgRNA. Such a prime editing system may be referred to as a “PE3b” prime editing system or composition. In some embodiments, the ngRNA comprises a spacer sequence that matches only the edit strand after incorporation of the nucleotide edits, but not the endogenous target gene sequence on the edit strand. Accordingly, in some embodiments, an intended nucleotide edit is incorporated within the ng search target sequence. In some embodiments, the intended nucleotide edit is incorporated within about 1-10 nucleotides of the position corresponding to the PAM of the ng search target sequence.

[0423] A PERNA and/or an ngRNA of this disclosure, in some embodiments, may include modified nucleotides, e.g., chemically modified DNA or RNA nucleobases, and may include one or more nucleobase analogs (e.g., modifications which might add functionality, such as temperature resilience). In some embodiments, PEgRNAs and/or ngRNAs as described herein may be chemically modified. The phrase “chemical modifications,” as used herein, can include modifications which introduce chemistries which differ from those seen in naturally occurring DNA or RNAs, for example, covalent modifications such as the introduction of modified nucleotides, (e.g., nucleotide analogs, or the inclusion of pendant groups which are not naturally found in DNA or RNA molecules).

[0424] In some embodiments, the PEgRNAs and/or ngRNAs provided in this disclosure may have undergone a chemical or biological modifications. Modifications may be made at any position within a PERNA or ngRNA, and may include modification to a nucleobase or to a phosphate backbone of the PEgRNA or ngRNA. In some embodiments, chemical modifications can be a structure guided modifications. In some embodiments, a chemical modification is at the 5′ end and/or the 3′ end of a PEgRNA. In some embodiments, a chemical modification is at the 5′ end and/or the 3′ end of a ngRNA. In some embodiments, a chemical modification may be within the spacer sequence, the extension arm, the editing template sequence, or the primer binding site of a PEgRNA. In some embodiments, a chemical modification may be within the spacer sequence or the gRNA core of a PEgRNA or a ngRNA. In some embodiments, a chemical modification may be within the 3′ most nucleotides of a PEgRNA or ngRNA. In some embodiments, a chemical modification may be within the 3′ most end of a PEgRNA or ngRNA. In some embodiments, a chemical modification may be within the 5′ most end of a PEgRNA or ngRNA. In some embodiments, a PERNA or ngRNA comprises 1, 2, 3, 4, 5, 6, 7, 8, 9, 10 or more chemically modified nucleotides at the 3′ end. In some embodiments, a PEgRNA or ngRNA comprises 1, 2, 3, 4, 5, 6, 7, 8, 9, 10 or more chemically modified nucleotides at the 5′ end. In some embodiments, a PEgRNA or ngRNA comprises 1, 2, 3, 4, or 5 or more chemically modified nucleotides at the 3′ end. In some embodiments, a PEgRNA or ngRNA comprises 1, 2, 3, 4, or 5 more chemically modified nucleotides at the 5′ end. In some embodiments, a PEgRNA or ngRNA comprises 1, 2, or 3 or more chemically modified nucleotides at the 3′ end. In some embodiments, a PERNA or ngRNA comprises 1, 2, or 3 more chemically modified nucleotides at the 5′ end. In some embodiments, a PEgRNA or ngRNA comprises 1, 2, 3, 4, 5, 6, 7, 8, 9, 10 or more contiguous chemically modified nucleotides at the 3′ end. In some embodiments, a PEgRNA or ngRNA comprises 1, 2, 3, 4, 5, 6, 7, 8, 9, 10 or more contiguous chemically modified nucleotides at the 5′ end. In some embodiments, a PERNA or ngRNA comprises 1, 2, 3, 4, or 5 contiguous chemically modified nucleotides at the 3′ end. In some embodiments, a PEgRNA or ngRNA comprises 1, 2, 3, 4, or 5 contiguous chemically modified nucleotides at the 5′ end. In some embodiments, a PEgRNA or ngRNA comprises 1, 2, or 3 contiguous chemically modified nucleotides at the 3′ end. In some embodiments, a PEgRNA or ngRNA comprises 1, 2, or 3 contiguous chemically modified nucleotides at the 5′ end. In some embodiments, a PEgRNA or ngRNA comprises 3 contiguous chemically modified nucleotides at the 3′ end. In some embodiments, a PEgRNA or ngRNA comprises 1, 2, 3, 4, 5, or more chemically modified nucleotides near the 3′ end. In some embodiments, a PEgRNA or ngRNA comprises 3 contiguous chemically modified nucleotides at the 3′ end. In some embodiments, a PEgRNA or ngRNA comprises 3 contiguous chemically modified nucleotides at the 5′ end. In some embodiments, a PEgRNA or ngRNA comprises 1, 2, 3, 4, 5, or more chemically modified nucleotides near the 3′ end. In some embodiments, a PEgRNA or ngRNA comprises 1, 2, 3, 4, 5, or more contiguous chemically modified nucleotides near the 3′ end. In some embodiments, a PEgRNA or ngRNA comprises 1, 2, 3, 4, 5, or more chemically modified nucleotides near the 3′ end, where the 3′ most nucleotide is not modified, and the 1, 2, 3, 4, 5, or more chemically modified nucleotides precede the 3′ most nucleotide in a 5′-to-3′ order. In some embodiments, a PEgRNA or ngRNA comprises 1, 2, 3, 4, 5, 6, 7, 8, 9, 10, 11, 12, 13, 14, 15, 16, 17, 18, 19, 20, 21, 22, 23, 24, 25, 26, 27, 28, 29, 30, 31, 32, 33, 34, 35 or more chemically modified nucleotides near the 3′ end, where the 3′ most nucleotide is not modified, and the 1, 2, 3, 4, 5, 6, 7, 8, 9, 10, 11, 12, 13, 14, 15, 16, 17, 18, 19, 20, 21, 22, 23, 24, 25, 26, 27, 28, 29, 30, 31, 32, 33, 34, 35 or more chemically modified nucleotides precede the 3′ most nucleotide in a 5′-to-3′ order.

[0425] In some embodiments, a PEgRNA or ngRNA comprises one or more chemical modified nucleotides in the gRNA core. The gRNA core may further comprise a nexus distal from the spacer sequence. In some embodiments, the gRNA core comprises one or more chemically modified nucleotides in the lower stem, upper stem, and/or the hairpin regions. In some embodiments, all of the nucleotides in the lower stem, upper stem, and/or the hairpin regions are chemically modified.

[0426] A chemical modification to a PEgRNA or ngRNA can comprise a 2′-O-thionocarbamate-protected nucleoside phosphoramidite, a 2′-O-methyl (M), a 2′-O-methyl 3′phosphorothioate (MS), or a 2′-O-methyl 3′thioPACE (MSP), or any combination thereof. In some embodiments, a chemically modified PEgRNA and/or ngRNA can comprise a 2′-O-methyl (M) RNA, a 2′-O-methyl 3′phosphorothioate (MS) RNA, a 2′-O-methyl 3′thioPACE (MSP) RNA, a 2′-F RNA, a phosphorothioate bond modification, any other chemical modifications known in the art, or any combination thereof. A chemical modification may also include, for example, the incorporation of non-nucleotide linkages or modified nucleotides into the PEgRNA and/or ngRNA (e.g., modifications to one or both of the 3′ and 5′ ends of a guide RNA molecule). Such modifications can include the addition of bases to an RNA sequence, complexing the RNA with an agent (e.g., a protein or a complementary nucleic acid molecule), and inclusion of elements which change the structure of an RNA molecule (e.g., which form secondary structures).

### Pharmaceutical Compositions

[0427] Disclosed herein are pharmaceutical compositions comprising any of the prime editing composition components, for example, split prime editors, fusion proteins, polynucleotides encoding split prime editor polypeptides, PEgRNAs, ngRNAs, and/or prime editing complexes described herein.

[0428] The term “pharmaceutical composition”, as used herein, refers to a composition formulated for pharmaceutical use. In some embodiments, the pharmaceutical composition further comprises a pharmaceutically acceptable carrier. In some embodiments, the pharmaceutical composition comprises additional agents, e.g., for specific delivery, increasing half-life, or other therapeutic compounds.

[0429] In some embodiments, a pharmaceutically-acceptable carrier comprises any vehicle, such as a liquid or solid filler, diluent, excipient, manufacturing aid (e.g., lubricant, talc magnesium, calcium or zinc stearate, or steric acid), or solvent encapsulating material, involved in carrying or transporting the compound from one site (e.g., the delivery site) of the body, to another site (e.g., organ, tissue or portion of the body). A pharmaceutically acceptable carrier is “acceptable” in the sense of being compatible with the other ingredients of the formulation and not injurious to the tissue of the subject (e.g., physiologically compatible, sterile, physiologic pH, etc.)

[0430] Formulations of the pharmaceutical compositions described herein can be prepared by any method known or hereafter developed in the art of pharmacology. In general, such preparatory methods include the step of bringing the active ingredient(s) into association with an excipient and/or one or more other accessory ingredients, and then, if necessary and/or desirable, shaping and/or packaging the product into a desired single- or multi-dose unit. Pharmaceutical formulations can additionally comprise a pharmaceutically acceptable excipient, which, as used herein, includes any and all solvents, dispersion media, diluents, or other liquid vehicles, dispersion or suspension aids, surface active agents, isotonic agents, thickening or emulsifying agents, preservatives, solid binders, lubricants and the like, as suited to the particular dosage form desired.

### Methods of Editing

[0431] The methods and compositions disclosed herein can be used to edit a target gene of interest by prime editing.

[0432] In some embodiments, the prime editing method comprises contacting a target gene, with a PERNA and a split prime editor described herein. In some embodiments, the target gene is double stranded, and comprises two strands of DNA complementary to each other. In some embodiments, the contacting with a PEgRNA and the contacting with a split prime editor are performed sequentially. In some embodiments, the contacting with a split prime editor is performed after the contacting with a PERNA. In some embodiments, the contacting with a PEgRNA is performed after the contacting with a split prime editor. In some embodiments, the contacting with a PEgRNA, and the contacting with a split prime editor are performed simultaneously. In some embodiments, the PEgRNA and the split prime editor are associated in a complex prior to contacting a target gene.

[0433] In some embodiments, contacting the target gene with the prime editing composition results in binding of the PEgRNA to a target strand of the target gene. In some embodiments, contacting the target gene with the prime editing composition results in binding of the PERNA to a search target sequence on the target strand of the target gene upon contacting with the PEgRNA. In some embodiments, contacting the target gene with the prime editing composition results in binding of a spacer sequence of the PEgRNA to a search target sequence with the search target sequence on the target strand of the target gene upon said contacting of the PEgRNA.

[0434] In some embodiments, contacting the target gene with the prime editing composition results in binding of the split prime editor to the target gene, e.g., the target gene, upon the contacting of the PE composition with the target gene. In some embodiments, the DNA binding domain of the PE associates with the PEgRNA. In some embodiments, the PE binds the target gene, directed by the PERNA. Accordingly, in some embodiments, the contacting of the target gene result in binding of a DNA binding domain of a split prime editor of the target gene directed by the PERNA.

[0435] In some embodiments, contacting the target gene with the prime editing composition results in a nick in an edit strand of the target gene, by the split prime editor upon contacting with the target gene, thereby generating a nicked on the edit strand of the target gene. In some embodiments, contacting the target gene with the prime editing composition results in a single-stranded DNA comprising a free 3′ end at the nick site of the edit strand of the target gene. In some embodiments, contacting the target gene with the prime editing composition results in a nick in the edit strand of the target gene by a DNA binding domain of the split prime editor, thereby generating a single-stranded DNA comprising a free 3′ end at the nick site. In some embodiments, the DNA binding domain of the split prime editor is a Cas domain. In some embodiments, the DNA binding domain of the split prime editor is a Cas9. In some embodiments, the DNA binding domain of the split prime editor is a Cas9 nickase.

[0436] In some embodiments, contacting the target gene with the prime editing composition results in hybridization of the PEgRNA with the 3′ end of the nicked single-stranded DNA, thereby priming DNA polymerization by a DNA polymerase domain of the split prime editor. In some embodiments, the free 3′ end of the single-stranded DNA generated at the nick site hybridizes to a primer binding site sequence (PBS) of the contacted PEgRNA, thereby priming DNA polymerization. In some embodiments, the DNA polymerization is reverse transcription catalyzed by a reverse transcriptase domain of the split prime editor. In some embodiments, the method comprises contacting the target gene with a DNA polymerase, e.g., a reverse transcriptase, as a part of a split prime editor protein or prime editing complex (in cis), or as a separate protein (in trans).

[0437] In some embodiments, contacting the target gene with the prime editing composition generates an edited single stranded DNA that is coded by the editing template of the PEgRNA by DNA polymerase mediated polymerization from the 3′ free end of the single-stranded DNA at the nick site. In some embodiments, the editing template of the PEgRNA comprises one or more intended nucleotide edits compared to endogenous sequence of the target gene. In some embodiments, the intended nucleotide edits are incorporated in the target gene, by excision of the 5′ single stranded DNA of the edit strand of the target gene generated at the nick site and DNA repair. In some embodiments, the intended nucleotide edits are incorporated in the target gene by excision of the editing target sequence and DNA repair. In some embodiments, excision of the 5′ single stranded DNA of the edit strand generated at the nick site is by a flap endonuclease. In some embodiments, the flap nuclease is FEN1. In some embodiments, the method further comprises contacting the target gene with a flap endonuclease. In some embodiments, the flap endonuclease is provided as a part of a split prime editor protein. In some embodiments, the flap endonuclease is provided in trans.

[0438] In some embodiments, contacting the target gene with the prime editing composition generates a mismatched heteroduplex comprising the edit strand of the target gene that comprises the edited single stranded DNA, and the unedited target strand of the target gene. Without being bound by theory, the endogenous DNA repair and replication may resolve the mismatched edited DNA to incorporate the nucleotide change(s) to form the desired edited target gene.

[0439] In some embodiments, the method further comprises contacting the target gene, with a nick guide (ngRNA) disclosed herein. In some embodiments, the ngRNA comprises a spacer that binds a second search target sequence on the edit strand of the target gene. In some embodiments, the contacted ngRNA directs the PE to introduce a nick in the target strand of the target gene. In some embodiments, the nick on the target strand (non-edit strand) results in endogenous DNA repair machinery to use the edit strand to repair the non-edit strand, thereby incorporating the intended nucleotide edit in both strand of the target gene and modifying the target gene. In some embodiments, the ngRNA comprises a spacer sequence that is complementary to, and may hybridize with, the second search target sequence on the edit strand only after the intended nucleotide edit(s) are incorporated in the edit strand of the target gene.

[0440] In some embodiments, the target gene is contacted by the ngRNA, the PEgRNA, and the PE simultaneously. In some embodiments, the ngRNA, the PEgRNA, and the PE form a complex when they contact the target gene. In some embodiments, the target gene is contacted with the ngRNA, the PEgRNA, and the split prime editor sequentially. In some embodiments, the target gene is contacted with the ngRNA and/or the PEgRNA after contacting the target gene with the PE. In some embodiments, the target gene is contacted with the ngRNA and/or the PEgRNA before contacting the target gene with the split prime editor.

[0441] In some embodiments, the target gene, is in a cell. Accordingly, also provided herein are methods of modifying a cell, such as a human cell, a human primary cell, and/or a human iPSC-derived cell.

[0442] In some embodiments, the prime editing method comprises introducing a PEgRNA, a split prime editor, and/or a ngRNA into the cell that has the target gene. In some embodiments, the prime editing method comprises introducing into the cell that has the target gene with a prime editing composition comprising a PERNA, a split prime editor polypeptide, and/or a ngRNA. In some embodiments, the PEgRNA, the split prime editor polypeptide, and/or the ngRNA form a complex prior to the introduction into the cell. In some embodiments, the PEgRNA, the split prime editor polypeptide, and/or the ngRNA form a complex after the introduction into the cell. The split prime editors, PEgRNA and/or ngRNAs, and prime editing complexes may be introduced into the cell by any delivery approaches described herein or any delivery approach known in the art, including ribonucleoprotein (RNPs), lipid nanoparticles (LNPs), viral vectors, non-viral vectors, mRNA delivery, and physical techniques such as cell membrane disruption by a microfluidics device. The split prime editors, PEgRNA and/or ngRNAs, and prime editing complexes may be introduced into the cell simultaneously or sequentially.

[0443] In some aspects, the disclosure provides a lipid nanoparticle or ribonucleoprotein comprising the prime editing system, or a component thereof, herein described. In certain aspects, the disclosure provides a polynucleotide encoding the prime editor herein described. In certain aspects, the disclosure provides a polynucleotide encoding the first polypeptide herein described. In certain aspects, the disclosure provides a polynucleotide encoding the second polypeptide herein described.

[0444] In some embodiments, the prime editing method comprises introducing into the cell a PEgRNA or a polynucleotide encoding the PEgRNA, a split prime editor polynucleotide encoding a split prime editor polypeptide, and optionally an ngRNA or a polynucleotide encoding the ngRNA. In some embodiments, the method comprises introducing the PERNA or the polynucleotide encoding the PEgRNA, the polynucleotide encoding the split prime editor polypeptide, and/or the ngRNA or the polynucleotide encoding the ngRNA into the cell simultaneously. In some embodiments, the method comprises introducing the PEgRNA or the polynucleotide encoding the PEgRNA, the polynucleotide encoding the split prime editor polypeptide, and/or the ngRNA or the polynucleotide encoding the ngRNA into the cell sequentially. In some embodiments, the method comprises introducing the polynucleotide encoding the split prime editor polypeptide into the cell before introduction of the PEgRNA or the polynucleotide encoding the PEgRNA and/or the ngRNA or the polynucleotide encoding the ngRNA. In some embodiments, the polynucleotide encoding the split prime editor polypeptide is introduced into and expressed in the cell before introduction of the PEgRNA or the polynucleotide encoding the PEgRNA and/or the ngRNA or the polynucleotide encoding the ngRNA into the cell. In some embodiments, the polynucleotide encoding the split prime editor polypeptide is introduced into the cell after the PEgRNA or the polynucleotide encoding the PEgRNA and/or the ngRNA or the polynucleotide encoding the ngRNA are introduced into the cell. The polynucleotide encoding the split prime editor polypeptide, the PEgRNA or the polynucleotide encoding the PERNA, and/or the ngRNA or the polynucleotide encoding the ngRNA, may be introduced into the cell by any delivery approaches described herein or any delivery approach known in the art, for example, by RNPs, LNPs, viral vectors, non-viral vectors, mRNA delivery, and physical delivery.

[0445] In some embodiments, the polynucleotide encoding the split prime editor polypeptide, the polynucleotide encoding the PEgRNA, and/or the polynucleotide encoding the ngRNA integrate into the genome of the cell after being introduced into the cell. In some embodiments, the polynucleotide encoding the split prime editor polypeptide, the polynucleotide encoding the PERNA, and/or the polynucleotide encoding the ngRNA are introduced into the cell for transient expression. Accordingly, also provided herein are cells modified by prime editing.

[0446] In some embodiments, the cell is a prokaryotic cell. In some embodiments, the cell is a eukaryotic cell. In some embodiments, the cell is a mammalian cell. In some embodiments, the cell is a non-human primate cell, bovine cell, porcine cell, rodent or mouse cell. In some embodiments, the cell is a human cell. In some embodiments, the cell is a primary cell. In some embodiments, the cell is a human primary cell. In some embodiments, the cell is a progenitor cell. In some embodiments, the cell is a human progenitor cell. In some embodiments, the cell is a human cell from an organ. In some embodiments, the cell is a primary human cell de

[0447] In some embodiments, the cell is a progenitor cell. In some embodiments, the cell is a stem cell. in some embodiments, the cell is an induced pluripotent stem cell. In some embodiments, the cell is an embryonic stem cell. In some embodiments, the cell is a retinal progenitor cell. In some embodiments, the cell is a retina precursor cell. In some embodiments, the cell is a fibroblast.

[0448] In some embodiments, the cell is a human stem cell. in some embodiments, the cell is an induced human pluripotent stem cell. In some embodiments, the cell is a human embryonic stem cell. In some embodiments, the cell is a human retinal progenitor cell. In some embodiments, the cell is a human retina precursor cell. In some embodiments, the cell is a human fibroblast.

[0449] In some embodiments, the cell is a primary cell. In some embodiments, the cell is a human primary cell. In some embodiments, the cell is a retina cell. In some embodiments, the cell is a photoreceptor. In some embodiments, the cell is a rod cell. In some embodiments, the cell is a cone cell. In some embodiments, the cell is a human cell from a retina. In some embodiments, the cell is a human photoreceptor. In some embodiments, the cell is a human rod cell. In some embodiments, the cell is a human cone cell. In some embodiments, the cell is a primary human photoreceptor derived from an induced human pluripotent stem cell (iPSC).

[0450] In some embodiments, the target gene edited by prime editing is in a chromosome of the cell. In some embodiments, the intended nucleotide edits incorporate in the chromosome of the cell and are inheritable by progeny cells. In some embodiments, the intended nucleotide edits introduced to the cell by the prime editing compositions and methods are such that the cell and progeny of the cell also include the intended nucleotide edits. In some embodiments, the cell is autologous, allogeneic, or xenogeneic to a subject. In some embodiments, the cell is from or derived from a subject. In some embodiments, the cell is from or derived from a human subject. In some embodiments, the cell is introduced back into the subject, e.g., a human subject, after incorporation of the intended nucleotide edits by prime editing.

[0451] In some embodiments, the method provided herein comprises introducing the split prime editor polypeptide or the polynucleotide encoding the split prime editor polypeptide, the PEgRNA or the polynucleotide encoding the PEgRNA, and/or the ngRNA or the polynucleotide encoding the ngRNA into a plurality or a population of cells that comprise the target gene. In some embodiments, the population of cells is of the same cell type. In some embodiments, the population of cells is of the same tissue or organ. In some embodiments, the population of cells is heterogeneous. In some embodiments, the population of cells is homogeneous. In some embodiments, the population of cells is from a single tissue or organ, and the cells are heterogeneous. In some embodiments, the introduction into the population of cells is ex vivo. In some embodiments, the introduction into the population of cells is in vivo, e.g., into a human subject.

[0452] In some embodiments, the target gene is in a genome of each cell of the population. In some embodiments, introduction of the split prime editor polypeptide or the polynucleotide encoding the split prime editor polypeptide, the PEgRNA or the polynucleotide encoding the PEgRNA, and/or the ngRNA or the polynucleotide encoding the ngRNA results in incorporation of one or more intended nucleotide edits in the target gene in at least one of the cells in the population of cells. In some embodiments, introduction of the split prime editor polypeptide or the polynucleotide encoding the split prime editor polypeptide, the PEgRNA or the polynucleotide encoding the PEgRNA, and/or the ngRNA or the polynucleotide encoding the ngRNA results in incorporation of the one or more intended nucleotide edits in the target gene in a plurality of the population of cells. In some embodiments, introduction of the split prime editor polypeptide or the polynucleotide encoding the split prime editor polypeptide, the PEgRNA or the polynucleotide encoding the PEgRNA, and/or the ngRNA or the polynucleotide encoding the ngRNA results in incorporation of the one or more intended nucleotide edits in the target gene in each cell of the population of cells. In some embodiments, introduction of the split prime editor polypeptide or the polynucleotide encoding the split prime editor polypeptide, the PEgRNA or the polynucleotide encoding the PEgRNA, and/or the ngRNA or the polynucleotide encoding the ngRNA results in incorporation of the one or more intended nucleotide edits in the target gene in sufficient number of cells such that the disease or disorder is treated, prevented or ameliorated.

[0453] In some embodiments, editing efficiency of the prime editing compositions and method described herein can be measured by calculating the percentage of edited target genes in a population of cells introduced with the prime editing composition. In some embodiments, the editing efficiency is determined after 1 hour, 2 hours, 6 hours, 12 hours, 24 hours, 36 hours, 48 hours, 3 days, 4 days, 5 days, 7 days, 10 days, or 14 days of exposing a target gene within the genome of a cell) to a prime editing composition. In some embodiments, the population of cells introduced with the prime editing composition is ex vivo. In some embodiments, the population of cells introduced with the prime editing composition is in vitro. In some embodiments, the population of cells introduced with the prime editing composition is in vivo. In some embodiments, the prime editing methods disclosed herein have an editing efficiency of at least about 1%, at least about 5%, at least about 10%, at least about 20%, at least about 30%, at least about 40%, at least about 50%, at least about 60%, at least about 70%, at least about 80%, at least about 90%, at least about 95%, or at least about 99% relative to a suitable control. In some embodiments, the prime editing methods disclosed herein have an editing efficiency of at least 25% relative to a suitable control. In some embodiments, the prime editing methods disclosed herein have an editing efficiency of at least 35% relative to a suitable control. In some embodiments, a prime editing method disclosed herein has an editing efficiency of at least 30% relative to a suitable control. In some embodiments, the prime editing methods disclosed herein have an editing efficiency of at least 45% relative to a suitable control. In some embodiments, the prime editing methods disclosed herein have an editing efficiency of at least 50% relative to a suitable control.

[0454] In some embodiments, the methods disclosed herein have an editing efficiency of at least about 1%, at least about 5%, at least about 7.5%, at least about 10%, at least about 15%, at least about 20%, at least about 30%, at least about 40%, at least about 50%, at least about 60%, at least about 70%, at least about 80%, at least about 90%, or at least about 95% of editing a primary cell relative to a suitable control.

[0455] In some embodiments, the methods disclosed herein have an editing efficiency of at least about 5%, at least about 7.5%, at least about 10%, at least about 15%, at least about 20%, at least about 30%, at least about 40%, at least about 50%, at least about 60%, at least about 70%, at least about 80%, at least about 90%, or at least about 95% of editing a hepatocyte relative to a corresponding control hepatocyte. In some embodiments, the hepatocyte is a human hepatocyte.

[0456] In some embodiments, the prime editing compositions provided herein are capable of incorporated one or more intended nucleotide edits without generating a significant proportion of indels. The term “indel(s)”, as used herein, refers to the insertion or deletion of a nucleotide base within a polynucleotide, for example, a target gene. Such insertions or deletions can lead to frame shift mutations within a coding region of a gene. Indel frequency of editing can be calculated by methods known in the art. In some embodiments, indel frequency can be calculated based on sequence alignment such as the CRISPResso 2 algorithm as described in Clement et al., Nat. Biotechnol. 37 (3): 224-226 (2019), which is incorporated herein in its entirety. In some embodiments, the methods disclosed herein can have an indel frequency of less than 20%, less than 10%, less than 9%, less than 8%, less than 7%, less than 6%, less than 5%, less than 4%, less than 3%, less than 2%, less than 1.5%, or less than 1%. In some embodiments, any number of indels is determined after at least 1 hour, at least 2 hours, at least 6 hours, at least 12 hours, at least 24 hours, at least 36 hours, at least 48 hours, at least 3 days, at least 4 days, at least 5 days, at least 7 days, at least 10 days, or at least 14 days of exposing a target gene (e.g., a gene within the genome of a cell) to a prime editing composition.

[0457] In some embodiments, the prime editing compositions provided herein are capable of incorporated one or more intended nucleotide edits efficiently without generating a significant proportion of indels. In some embodiments, the prime editing methods disclosed herein have an editing efficiency of at least about 1% and an indel frequency of less than 1% in a target cell, e.g., a human primary cell, human iPSC, or human fibroblast. In some embodiments, the prime editing methods disclosed herein have an editing efficiency of at least about 1% and an indel frequency of less than 0.5% in a target cell, e.g., a human primary cell, human iPSC, or human fibroblast. In some embodiments, the prime editing methods disclosed herein have an editing efficiency of at least about 1% and an indel frequency of less than 0.1% in a target cell, e.g., a human primary cell, a human iPSC, or a human fibroblast. In some embodiments, the prime editing methods disclosed herein have an editing efficiency of at least about 5% and an indel frequency of less than 1% in a target cell, e.g., a human primary cell, a human iPSC, or a human fibroblast. In some embodiments, the prime editing methods disclosed herein have an editing efficiency of at least about 5% and an indel frequency of less than 0.5% in a target cell, e.g., a human primary cell, a human iPSC, or a human fibroblast. In some embodiments, the prime editing methods disclosed herein have an editing efficiency of at least about 5% and an indel frequency of less than 0.1% in a target cell, e.g., a human primary cell, a human iPSC, or a human fibroblast.

[0458] In some embodiments, the prime editing methods disclosed herein have an editing efficiency of at least about 7.5% and an indel frequency of less than 1% in a target cell, e.g., a human primary cell, a human iPSC, or a human fibroblast. In some embodiments, the prime editing methods disclosed herein have an editing efficiency of at least about 7.5% and an indel frequency of less than 0.5% in a target cell, e.g., a human primary cell, a human iPSC, or a human fibroblast. In some embodiments, the prime editing methods disclosed herein have an editing efficiency of at least about 7.5% and an indel frequency of less than 0.1% in a target cell, e.g., a human primary cell, a human iPSC, or a human fibroblast.

[0459] In some embodiments, the prime editing methods disclosed herein have an editing efficiency of at least about 10% and an indel frequency of less than 1% in a target cell, e.g., a human primary cell, a human iPSC, or a human fibroblast. In some embodiments, the prime editing methods disclosed herein have an editing efficiency of at least about 10% and an indel frequency of less than 0.5% in a target cell, e.g., a human primary cell, a human iPSC, or a human fibroblast. In some embodiments, the prime editing methods disclosed herein have an editing efficiency of at least about 10% and an indel frequency of less than 0.1% in a target cell, e.g., a human primary cell, a human iPSC, or a human fibroblast.

[0460] In some embodiments, the prime editing methods disclosed herein have an editing efficiency of at least about 15% and an indel frequency of less than 1% in a target cell, e.g., a human primary cell, a human iPSC, or a human fibroblast. In some embodiments, the prime editing methods disclosed herein have an editing efficiency of at least about 15% and an indel frequency of less than 0.5% in a target cell, e.g., a human primary cell, a human iPSC, or a human fibroblast. In some embodiments, the prime editing methods disclosed herein have an editing efficiency of at least about 15% and an indel frequency of less than 0.1% in a target cell, e.g., a human primary cell, a human iPSC, or a human fibroblast.

[0461] In some embodiments, the prime editing methods disclosed herein have an editing efficiency of at least about 20% and an indel frequency of less than 1% in a target cell, e.g., a human primary cell, a human iPSC, or a human fibroblast. In some embodiments, the prime editing methods disclosed herein have an editing efficiency of at least about 20% and an indel frequency of less than 0.5% in a target cell, e.g., a human primary cell, a human iPSC, or a human fibroblast. In some embodiments, the prime editing methods disclosed herein have an editing efficiency of at least about 20% and an indel frequency of less than 0.1% in a target cell, e.g., a human primary cell, a human iPSC, or a human fibroblast.

[0462] In some embodiments, the prime editing methods disclosed herein have an editing efficiency of at least about 30% and an indel frequency of less than 1% in a target cell, e.g., a human primary cell, a human iPSC, or a human fibroblast. In some embodiments, the prime editing methods disclosed herein have an editing efficiency of at least about 30% and an indel frequency of less than 0.5% in a target cell, e.g., a human primary cell, a human iPSC, or a human fibroblast. In some embodiments, the prime editing methods disclosed herein have an editing efficiency of at least about 30% and an indel frequency of less than 0.1% in a target cell, e.g., a human primary cell, a human iPSC, or a human fibroblast.

[0463] In some embodiments, the prime editing methods disclosed herein have an editing efficiency of at least about 40% and an indel frequency of less than 1% in a target cell, e.g., a human primary cell, a human iPSC, or a human fibroblast. In some embodiments, the prime editing methods disclosed herein have an editing efficiency of at least about 40% and an indel frequency of less than 0.5% in a target cell, e.g., a human primary cell, a human iPSC, or a human fibroblast. In some embodiments, the prime editing methods disclosed herein have an editing efficiency of at least about 40% and an indel frequency of less than 0.1% in a target cell, e.g., a human primary cell, a human iPSC, or a human fibroblast.

[0464] In some embodiments, the prime editing methods disclosed herein have an editing efficiency of at least about 50% and an indel frequency of less than 1% in a target cell, e.g., a human primary cell, a human iPSC, or a human fibroblast. In some embodiments, the prime editing methods disclosed herein have an editing efficiency of at least about 50% and an indel frequency of less than 0.5% in a target cell, e.g., a human primary cell, a human iPSC, or a human fibroblast. In some embodiments, the prime editing methods disclosed herein have an editing efficiency of at least about 50% and an indel frequency of less than 0.1% in a target cell, e.g., a human primary cell, a human iPSC, or a human fibroblast.

[0465] In some embodiments, the prime editing methods disclosed herein have an editing efficiency of at least about 60% and an indel frequency of less than 1% in a target cell, e.g., a human primary cell, a human iPSC, or a human fibroblast. In some embodiments, the prime editing methods disclosed herein have an editing efficiency of at least about 60% and an indel frequency of less than 0.5% in a target cell, e.g., a human primary cell, a human iPSC, or a human fibroblast. In some embodiments, the prime editing methods disclosed herein have an editing efficiency of at least about 60% and an indel frequency of less than 0.1% in a target cell, e.g., a human primary cell, a human iPSC, or a human fibroblast.

[0466] In some embodiments, the prime editing methods disclosed herein have an editing efficiency of at least about 70% and an indel frequency of less than 1% in a target cell, e.g., a human primary cell, a human iPSC, or a human fibroblast. In some embodiments, the prime editing methods disclosed herein have an editing efficiency of at least about 70% and an indel frequency of less than 0.5% in a target cell, e.g., a human primary cell, a human iPSC, or a human fibroblast. In some embodiments, the prime editing methods disclosed herein have an editing efficiency of at least about 70% and an indel frequency of less than 0.1% in a target cell, e.g., a human primary cell, a human iPSC, or a human fibroblast.

[0467] In some embodiments, the prime editing methods disclosed herein have an editing efficiency of at least about 80% and an indel frequency of less than 1% in a target cell, e.g., a human primary cell, a human iPSC, or a human fibroblast. In some embodiments, the prime editing methods disclosed herein have an editing efficiency of at least about 80% and an indel frequency of less than 0.5% in a target cell, e.g., a human primary cell, a human iPSC, or a human fibroblast. In some embodiments, the prime editing methods disclosed herein have an editing efficiency of at least about 80% and an indel frequency of less than 0.1% in a target cell, e.g., a human primary cell, a human iPSC, or a human fibroblast.

[0468] In some embodiments, the prime editing methods disclosed herein have an editing efficiency of at least about 90% and an indel frequency of less than 1% in a target cell, e.g., a human primary cell, a human iPSC, or a human fibroblast. In some embodiments, the prime editing methods disclosed herein have an editing efficiency of at least about 90% and an indel frequency of less than 0.5% in a target cell, e.g., a human primary cell, a human iPSC, or a human fibroblast. In some embodiments, the prime editing methods disclosed herein have an editing efficiency of at least about 90% and an indel frequency of less than 0.1% in a target cell, e.g., a human primary cell, a human iPSC, or a human fibroblast.

[0469] In some embodiments, the prime editing methods disclosed herein have an editing efficiency of at least about 95% and an indel frequency of less than 1% in a target cell, e.g., a human primary cell, a human iPSC, or a human fibroblast. In some embodiments, the prime editing methods disclosed herein have an editing efficiency of at least about 95% and an indel frequency of less than 0.5% in a target cell, e.g., a human primary cell, a human iPSC, or a human fibroblast. In some embodiments, the prime editing methods disclosed herein have an editing efficiency of at least about 95% and an indel frequency of less than 0.1% in a target cell, e.g., a human primary cell, a human iPSC, or a human fibroblast. In some embodiments, any number of indels is determined after at least 1 hour, at least 2 hours, at least 6 hours, at least 12 hours, at least 24 hours, at least 36 hours, at least 48 hours, at least 3 days, at least 4 days, at least 5 days, at least 7 days, at least 10 days, or at least 14 days of exposing a target gene (e.g., a gene within the genome of a cell) to a prime editing composition. In some embodiments, the editing efficiency is determined after 1 hour, 2 hours, 6 hours, 12 hours, 24 hours, 36 hours, 48 hours, 3 days, 4 days, 5 days, 7 days, 10 days, or 14 days of exposing a target gene (e.g., a gene within the genome of a cell) to a prime editing composition.

[0470] In some embodiments, the prime editing composition described herein result in less than 50%, less than 40%, less than 30%, less than 20%, less than 19%, less than 18%, less than 17%, less than 16%, less than 15%, less than 14%, less than 13%, less than 12%, less than 11%, less than 10%, less than 9%, less than 8%, less than 7%, less than 6%, less than 5%, less than 4%, less than 3%, less than 2%, less than 1%, less than 0.9%, less than 0.8%, less than 0.7%, less than 0.6%, less than 0.5%, less than 0.4%, less than 0.3%, less than 0.2%, less than 0.1%, less than 0.09%, less than 0.08%, less than 0.07%, less than 0.06%, less than 0.05%, less than 0.04%, less than 0.03%, less than 0.02%, or less than 0.01% off-target editing in a chromosome that includes the target gene. In some embodiments, off-target editing is determined after at least 1 hour, at least 2 hours, at least 6 hours, at least 12 hours, at least 24 hours, at least 36 hours, at least 48 hours, at least 3 days, at least 4 days, at least 5 days, at least 7 days, at least 10 days, or at least 14 days of exposing a target gene (e.g., a nucleic acid within the genome of a cell) to a prime editing composition.

[0471] In some embodiments, the prime editing compositions (e.g., PEgRNAs and split prime editors as described herein) and prime editing methods disclosed herein can be used to edit a target gene. In some embodiments, the target gene comprises a mutation compared to a wild type gene. In some embodiments, the mutation is associated a disease. In some embodiments, the target gene comprises an editing target sequence that contains the mutation associated with a disease. In some embodiments, the mutation is in a coding region of the target gene. In some embodiments, the mutation is in an exon of the target gene. In some embodiments, the prime editing method comprises contacting a target gene with a prime editing composition comprising a split prime editor, a PERNA, and/or a ngRNA. In some embodiments, contacting the target gene with the prime editing composition results in incorporation of one or more intended nucleotide edits in the target gene. In some embodiments, the incorporation is in a region of the target gene that corresponds to an editing target sequence in the gene. In some embodiments, the one or more intended nucleotide edits comprises a single nucleotide substitution, an insertion, a deletion, or any combination thereof, compared to the endogenous sequence of the target gene. In some embodiments, incorporation of the one or more intended nucleotide edits results in replacement of one or more mutations with the corresponding sequence that encodes a wild type protein. In some embodiments, incorporation of the one or more intended nucleotide edits results in replacement of the one or more mutations with the corresponding sequence in a wild type gene. In some embodiments, incorporation of the one more intended nucleotide edits results in correction of a mutation in the target gene. In some embodiments, the target gene comprises an editing template sequence that contains the mutation. In some embodiments, contacting the target gene with the prime editing composition results in incorporation of one or more intended nucleotide edits in the target gene, which corrects the mutation in the editing target sequence (or a double stranded region comprising the editing target sequence and the complementary sequence to the editing target sequence on a target strand) in the target gene.

[0472] In some embodiments, incorporation of the one more intended nucleotide edits results in correction of a mutation in the target gene. In some embodiments, incorporation of the one more intended nucleotide edits results in correction of a gene sequence and restores wild type expression and function of the protein.

[0473] In some embodiments, the target gene is in a target cell. Accordingly, in one aspect provided herein is a method of editing a target cell comprising a target gene that encodes a polypeptide that comprises one or more mutations relative to a wild type gene. In some embodiments, the methods of the present disclosure comprise introducing a prime editing composition comprising a PEgRNA, a split prime editor polypeptide, and/or a ngRNA into the target cell that has the target gene to edit the target gene, thereby generating an edited cell. In some embodiments, the target cell is a mammalian cell. In some embodiments, the target cell is a human cell. In some embodiments, the target cell is a primary cell. In some embodiments, the target cell is a human primary cell. In some embodiments, the target cell is a progenitor cell. In some embodiments, the target cell is a human progenitor cell. In some embodiments, the target cell is a stem cell. In some embodiments, the target cell is a human stem cell. In some embodiments, the target cell is a hepatocyte. In some embodiments, the target cell is a human hepatocyte. In some embodiments, the target cell is a primary human hepatocyte derived from an induced human pluripotent stem cell (iPSC). In some embodiments, the cell is a neuron. In some embodiments, the cell is a neuron from basal ganglia. In some embodiments, the cell is a neuron from basal ganglia of a subject. In some embodiments, the cell is a neuron in the basal ganglia of a subject.

[0474] In some embodiments, components of a prime editing composition described herein are provided to a target cell in vitro. In some embodiments, components of a prime editing composition described herein are provided to a target cell ex vivo. In some embodiments, components of a prime editing composition described herein are provided to a target cell in vivo.

[0475] In some embodiments, incorporation of the one or more intended nucleotide edits in the target gene that comprises one or more mutations restores wild type expression and function of protein encoded by the gene. In some embodiments, the target gene encodes at least one mutation as compared to the wild type protein prior to incorporation of the one or more intended nucleotide edits. In some embodiments, expression and/or function of protein may be measured when expressed in a target cell. In some embodiments, incorporation of the one or more intended nucleotide edits in the target gene comprising one or more mutations lead to a fold change in a level of gene expression, protein expression, or a combination thereof. In some embodiments, a change in the level of gene expression can comprise a fold change of, e.g., 2-fold, 3-fold, 4-fold, 5-fold, 6-fold, 7-fold, 8-fold, 9-fold, 10-fold, 15-fold, 20-fold, 25-fold, 30-fold, 40-fold, 50-fold, 60-fold, 70-fold, 80-fold, 90-fold, 100-fold or greater as compared to expression in a suitable control cell not introduced with a prime editing composition described herein. In some embodiments, incorporation of the one or more intended nucleotide edits in the target gene that comprises one or more mutations restores wild type expression of protein by at least 10%, 20%, 30%, 40%, 50%, 60%, 70%, 80%, 90%, 95%, 099% or more as compared to wild type expression of the protein in a suitable control cell that comprises a wild type gene.

[0476] In some embodiments, an expression increase can be measured by a functional assay. In some embodiments, protein expression can be measured using a protein assay. In some embodiments, protein expression can be measured using antibody testing. In some embodiments, protein expression can be measured using ELISA, mass spectrometry, Western blot, sodium dodecyl sulfate polyacrylamide gel electrophoresis (SDS-PAGE), high performance liquid chromatography (HPLC), electrophoresis, or any combination thereof. In some embodiments, a protein assay can comprise SDS-PAGE and densitometric analysis of a Coomassie Blue-stained gel.

### Delivery

[0477] Prime editing compositions described herein can be delivered to a cellular environment with any approach known in the art. Components of a prime editing composition can be delivered to a cell by the same mode or different modes. For example, in some embodiments, a split prime editor can be delivered as a polypeptide or a polynucleotide (DNA or RNA) encoding the polypeptide. In some embodiments, a PEgRNA can be delivered directly as an RNA or as a DNA encoding the PEgRNA.

[0478] In some embodiments, a prime editing composition component is encoded by a polynucleotide, a vector, or a construct. In some embodiments, a split prime editor polypeptide, a PEgRNA and/or a ngRNA is encoded by a polynucleotide. In some embodiments, the polynucleotide encodes a split prime editor protein comprising a DNA binding domain and a DNA polymerase domain. In some embodiments, the polynucleotide encodes a DNA polymerase domain of a split prime editor. In some embodiments, the polynucleotide encodes a DNA polymerase domain of a split prime editor. In some embodiments, the polynucleotide encodes a portion of a split prime editor protein, for example, a N-terminal portion of a split prime editor protein connected to an intein-N. In some embodiments, the polynucleotide encodes a portion of a split prime editor protein, for example, a C-terminal portion of a split prime editor protein connected to an intein-C. In some embodiments, the polynucleotide encodes a PEgRNA and/or a ngRNA. In some embodiments, the polypeptide encodes two or more components of a prime editing composition, for example, a split prime editor protein and a PEgRNA.

[0479] In some embodiments, the polynucleotide encoding one or more prime editing composition components is delivered to a target cell is integrated into the genome of the cell for long-term expression, for example, by a retroviral vector. In some embodiments, the polynucleotide delivered to a target cell is expressed transiently. For example, the polynucleotide may be delivered in the form of a mRNA, or a non-integrating vector (non-integrating virus, plasmids, minicircle DNAs) for episomal expression.

[0480] In some embodiments, a polynucleotide encoding one or more prime editing system components can be operably linked to a regulatory element, e.g., a transcriptional control element, such as a promoter. In some embodiments, the polynucleotide is operably linked to multiple control elements. Depending on the expression system utilized, any of a number of suitable transcription and translation control elements, including constitutive and inducible promoters, transcription enhancer elements, transcription terminators, etc. may be used in the expression vector (e.g., U6 promoter, H1 promoter).

[0481] In some embodiments, the polynucleotide encoding one or more prime editing composition components is a part of, or is encoded by, a vector. In some embodiments, the vector is a viral vector. In some embodiments, the vector is a non-viral vector.

[0482] Non-viral vector delivery systems can include DNA plasmids, RNA (e.g., a transcript of a vector described herein), naked nucleic acid, and nucleic acid complexed with a delivery vehicle, such as a liposome. In some embodiments, the polynucleotide is provided as an RNA, e.g., a mRNA or a transcript. Any RNA of the prime editing systems, for example a guide RNA or a base editor-encoding mRNA, can be delivered in the form of RNA. In some embodiments, one or more components of the prime editing system that are RNAs is produced by direct chemical synthesis or may be transcribed in vitro from a DNA. In some embodiments, a mRNA that encodes a split prime editor polypeptide is generated using in vitro transcription. Guide polynucleotides (e.g., PEgRNA or ngRNA) can also be transcribed using in vitro transcription from a cassette containing a T7 promoter, followed by the sequence “GG”, and guide polynucleotide sequence. In some embodiments, the split prime editor encoding mRNA, PEgRNA, and/or ngRNA are synthesized in vitro using an RNA polymerase enzyme (e.g., T7 polymerase, T3 polymerase, SP6 polymerase, etc.). Once synthesized, the RNA can directly contact a target gene or can be introduced into a cell using any suitable technique for introducing nucleic acids into cells (e.g., microinjection, electroporation, transfection). In some embodiments, the split prime editor-coding sequences, the PEgRNAs, and/or the ngRNAs are modified to include one or more modified nucleoside e.g., using pseudo-U or 5-Methyl-C.

[0483] Methods of non-viral delivery of nucleic acids can include lipofection, nucleofection, microinjection, biolistics, virosomes, liposomes, immunoliposomes, polycation or lipid: nucleic acid conjugates, naked DNA, artificial virions, cell membrane disruption by a microfluidics device, and agent-enhanced uptake of DNA. Cationic and neutral lipids that are suitable for efficient receptor-recognition lipofection of polynucleotides can be used. Delivery can be to cells (e.g., in vitro or ex vivo administration) or target tissues (e.g., in vivo administration). The preparation of lipid: nucleic acid complexes, including targeted liposomes such as immunolipid complexes, can be used.

[0484] Viral vector delivery systems can include DNA and RNA viruses, which can have either episomal or integrated genomes after delivery to the cell. RNA or DNA viral based systems can be used to target specific cells and trafficking the viral payload to an organelle of the cell. Viral vectors can be administered directly (in vivo) or they can be used to treat cells in vitro, and the modified cells can optionally be administered (ex vivo).

[0485] In some embodiments, the viral vector is a retroviral, lentiviral, adenoviral, adeno-associated viral or herpes simplex viral vector. Retroviral vectors can include those based upon murine leukemia virus (MuLV), gibbon ape leukemia virus (GaLV), simian immunodeficiency virus (SIV), human immunodeficiency virus (HIV), and combinations thereof. In some embodiments, the retroviral vector is a lentiviral vector. In some embodiments, the retroviral vector is a gamma retroviral vector. In some embodiments, the viral vector is an adenoviral vector. In some embodiments, the viral vector is an adeno-associated virus (“AAV”) vector (e.g., a trans-splicing AAV vector). In some embodiments, an AAV viral vector may be used for trans-splicing system to express components of split prime editors (e.g., express components of split prime editors separately and/or spliced together).

[0486] In some embodiments, polynucleotides encoding one or more prime editing composition components are packaged in a virus particle. Packaging cells can be used to form virus particles that can infect a target cell. Such cells can include 293 cells, (e.g., for packaging adenovirus), and w2 cells or PA317 cells (e.g., for packaging retrovirus). Viral vectors can be generated by producing a cell line that packages a nucleic acid vector into a viral particle. The vectors can contain the minimal viral sequences required for packaging and subsequent integration into a host. The vectors can contain other viral sequences being replaced by an expression cassette for the polynucleotide(s) to be expressed. The missing viral functions can be supplied in trans by the packaging cell line. For example, AAV vectors can comprise ITR sequences from the AAV genome which are required for packaging and integration into the host genome.

[0487] In some embodiments, dual AAV vectors are generated by splitting a large transgene expression cassette in two separate halves (5′ and 3′ ends that encode N-terminal portion and C-terminal portion of, e.g., a split prime editor polypeptide), where each half of the cassette is no more than 5 kb in length, optionally no more than 4.7 kb in length, and is packaged in a single AAV vector. In some embodiments, the full-length transgene expression cassette is reassembled upon co-infection of the same cell by both dual AAV vectors. In some embodiments, a portion or fragment of a split prime editor polypeptide, e.g., a Cas9 nickase, is fused to an intein. The portion or fragment of the polypeptide can be fused to the N-terminus or the C-terminus of the intein. In some embodiments, a N-terminal portion of the polypeptide is fused to an intein-N, and a C-terminal portion of the polypeptide is separately fused to an intein-C. In some embodiments, a portion or fragment of a split prime editor protein is fused to an intein and fused to an AAV capsid protein. The intein, nuclease and capsid protein can be fused together in any arrangement (e.g., nuclease-intein-capsid, intein-nuclease-capsid, capsid-intein-nuclease, etc.). In some embodiments, a polynucleotide encoding a split prime editor protein is split in two separate halves, each encoding a portion of the split prime editor protein and separately fused to an intein. In some embodiments, each of the two halves of the polynucleotide is packaged in an individual AAV vector of a dual AAV vector system. In some embodiments, each of the two halves of the polynucleotide is no more than 5 kb in length, optionally no more than 4.7 kb in length. In some embodiments, the full-length split prime editor protein is reassembled upon co-infection of the same cell by both dual AAV vectors, expression of both halves of the split prime editor protein, and self-excision of the inteins.

[0488] A target cell can be transiently or non-transiently transfected with one or more vectors described herein. A cell can be transfected as it naturally occurs in a subject. A cell can be taken or derived from a subject and transfected. A cell can be derived from cells taken from a subject, such as a cell line. In some embodiments, a cell transfected with one or more vectors described herein can be used to establish a new cell line comprising one or more vector-derived sequences. In some embodiments, a cell transiently transfected with the compositions of the disclosure (such as by transient transfection of one or more vectors, or transfection with RNA), and modified through the activity of a split prime editor, can be used to establish a new cell line comprising cells containing the modification but lacking any other exogenous sequence. Any suitable vector compatible with the host cell can be used with the methods of the disclosure. Non-limiting examples of vectors include pXT1, pSG5, pSVK3, pBPV, pMSG, and pSVLSV40.

[0489] In some embodiments, a split prime editor protein can be provided to cells as a polypeptide. In some embodiments, the split prime editor protein is fused to a polypeptide domain that increases solubility of the protein. In some embodiments, the split prime editor protein is formulated to improve solubility of the protein.

[0490] In some embodiment, a split prime editor polypeptide is fused to a polypeptide permeant domain to promote uptake by the cell. In some embodiments, the permeant domain is a including peptide, a peptidomimetic, or a non-peptide carrier. For example, a permeant peptide may be derived from the third alpha helix of Drosophila melanogaster transcription factor Antennapaedia, referred to as penetratin, which comprises the amino acid sequence RQIKIWFQNRRMKWKK (SEQ ID NO: 8777). As another example, the permeant peptide can comprise the HIV-1 tat basic region amino acid sequence, which may include, for example, amino acids 49-57 of naturally-occurring tat protein. Other permeant domains can include poly-arginine motifs, for example, the region of amino acids 34-56 of HIV-1 rev protein, nona-arginine (SEQ ID NO: 8778), and octa-arginine (SEQ ID NO: 8779). The nona-arginine (R9) sequence (SEQ ID NO: 8778) can be used. The site at which the fusion can be made may be selected in order to optimize the biological activity, secretion or binding characteristics of the polypeptide.

[0491] In some embodiments, a split prime editor polypeptide is produced in vitro or by host cells, and it may be further processed by unfolding, e.g., heat denaturation, DTT reduction, etc. and may be further refolded. In some embodiments, a split prime editor polypeptide is prepared by in vitro synthesis. Various commercial synthetic apparatuses can be used. By using synthesizers, naturally occurring amino acids can be substituted with unnatural amino acids. In some embodiments, a split prime editor polypeptide is isolated and purified in accordance with recombinant synthesis methods, for example, by expression in a host cell and the lysate purified using HPLC, exclusion chromatography, gel electrophoresis, affinity chromatography, or other purification technique.

[0492] In some embodiments, a prime editing composition, for example, split prime editor polypeptide components and PERNA/ngRNA are introduced to a target cell by nanoparticles. In some embodiments, the split prime editor polypeptide components and the PERNA and/or ngRNA form a complex in the nanoparticle. Any suitable nanoparticle design can be used to deliver genome editing system components or nucleic acids encoding such components. In some embodiments, the nanoparticle is inorganic. In some embodiments, the nanoparticle is organic. In some embodiments, a prime editing composition is delivered to a target cell, e.g., a hepatocyte, in an organic nanoparticle, e.g., a lipid nanoparticle (LNP) or polymer nanoparticle.

[0493] In some embodiments, LNPs are formulated from cationic, anionic, neutral lipids, or combinations thereof. In some embodiments, neutral lipids, such as the fusogenic phospholipid DOPE or the membrane component cholesterol, are included to enhance transfection activity and nanoparticle stability. In some embodiments, LNPs are formulated with hydrophobic lipids, hydrophilic lipids, or combinations thereof. Lipids may be formulated in a wide range of molar ratios to produce an LNP. Any lipid or combination of lipids that are known in the art can be used to produce an LNP. Exemplary lipids used to produce LNPs are provided in Table 8 below.

[0494] In some embodiments, components of a prime editing composition form a complex prior to delivery to a target cell. For example, a split prime editor protein, a PEgRNA, and/or a ngRNA can form a complex prior to delivery to the target cell. In some embodiments, a prime editing polypeptide (e.g., a split prime editor protein) and a guide polynucleotide (e.g., a PEgRNA or ngRNA) form a ribonucleoprotein (RNP) for delivery to a target cell. In some embodiments, the RNP comprises a split prime editor protein in complex with a PEgRNA. RNPs may be delivered to cells using known methods, such as electroporation, nucleofection, or cationic lipid-mediated methods, or any other approaches known in the art. In some embodiments, delivery of a prime editing composition or complex to the target cell does not require the delivery of foreign DNA into the cell. In some embodiments, the RNP comprising the prime editing complex is degraded over time in the target cell. Exemplary lipids for use in nanoparticle formulations and/or gene transfer are shown in Table 8 below.

TABLE 8
Exemplary lipids for nanoparticle formulation or gene transfer

| Lipid | Abbreviation | Feature |
|---|---|---|
| 1,2-Dioleoyl-sn-glycero-3-phosphatidylcholine | DOPC | Helper |
| 1,2-Dioleoyl-sn-glycero-3-phosphatidylethanolamine | DOPE | Helper |
| Cholesterol | | Helper |
| N41-(2,3-Dioleyloxy)prophyliN,N,N- | DOTMA | Cationic |
| trimethylammonium chloride | | |
| 1,2-Dioleoyloxy-3-trimethylammonium-propane | DOGS | Cationic |
| Dioctadecylamidoglycylspermine | | |
| N-(3-Aminopropy1)-N,N-dimethy1-2,3-bis(dodecyloxy)- | GAP-DLRIE | Cationic |
| 1-propanaminium bromide | | |
| Cetyltrimethylammonium bromide | CTAB | Cationic |
| 6-Lauroxyhexyl omithinate | LHON | Cationic |
| 1-(2,3-Dioleoyloxypropy1)-2,4,6-trimethylpyridinium | 2Oc | Cationic |
| 2,3-Dioleyloxy-N-P(spenninecarboxamido-ethy1J- | DOSPA | Cationic |
| N,Ndimethyl-1-propanatninium trifluoroacetate | | |
| 1,2-Dioley 1-3-trimethylamtnonium-propane | DOPA | Cationic |
| N-(2-Hydroxyethyl)-N,N-dimethy1-2,3- | MDRIE | Cationic |
| bis(tetradecyloxy)-1-propanaminium bromide | | |
| Dimyristooxypropyl dimethyl hydroxyethyl ammonium | DMRI | Cationic |
| bromide | | |
| 3β-[N-(N′,N′-Dimethylaminoethane)- | DC-Chol | Cationic |
| carbamoyl]cholesterol | | |
| Bis-guanidium-tren-cholesterol | BGTC | Cationic |
| 1,3-Diodeoxy-2-(6-carboxy-spermy1)-propylamide | DOSPER | Cationic |
| Dimethyloctadecylammonium bromide | DDAB | Cationic |
| Dioctadecylamidoglicylspermidin | DSL | Cationic |
| rac-[(2,3-Dioctadecyloxypropyl)(2-hydroxyethyl)]- | CLIP-1 | Cationic |
| dimethylammonium chloride | | |
| rac-[2(2,3-Dihexadecyloxypropyloxymethyloxy) | CLIP-6 | Cationic |
| ethyl]trimethylammoniun bromide | | |
| Ethyldimyristoylphosphatidylcholine | EDMPC | Cationic |
| 1,2-Distearyloxy-N,N-dimethyl-3-aminopropane | DSDMA | Cationic |
| 1,2-Dimyristoyl-trimethylammonium propane | DMTAP | Cationic |
| O,O′-Dimyristyl-N-lysyl aspartate | DMKE | Cationic |
| 1,2-Distearoyl-sn-glycero-3-ethylpho sphocholine | DSEPC | Cationic |
| N-Palmitoyl D-erythro-sphingosyl carbamoyl-spenmine | CCS | Cationic |
| N-t-Butyl-N0-tetradecyl-3- | diC14- | Cationic |
| tetradecylaminopropionamidine | amidine | |
| Octadecenolyoxy[ethyl-2-heptadeceny1-3 | DOTIM | Cationic |
| hydroxyethyl] imidazolinium chloride | | |
| N1-Cholesteryloxycarbonyl-3,7-diazanonane-1,9- | CDAN | Cationic |
| diamine | | |
| 2-(3-Bis(3-amino-propy1)-amino]propylamino)- | RPR209120 | Cationic |
| Nditetradecylcarbamoylme-ethyl-acetamide | | |
| 1,2-dilinoleyloxy-3-dimethylaminopropane | DLinDMA | Cationic |
| 2,2-dilinoley1-4-dimethylaminoethyl-[1,3]-dioxolane | DLin-KC2- | Cationic |
| | DMA | |
| dilinoleyl-methyl-4-dimethylaminobutyrate | DLin-MC3- | Cationic |
| | DMA | |

[0495] Exemplary polymers for use in nanoparticle formulations and/or gene transfer are shown in Table 9 below.

TABLE 9
Exemplary lipids for nanoparticle formulation or gene transfer

| Polymer | Abbreviation |
|---|---|
| Poly(ethylene)glycol | PEG |
| Polyethylenimine | PEI |
| Dithiobis (succinimidylpropionate) | DSP |
| Dimethyl-3,3′-dithiobispropionimidate | DTBP |
| Poly(ethylene imine)biscarbamate | PEIC |
| Poly(L-lysine) | PLL |
| Histidine modified PLL | |
| Poly(N-vinylpyrrolidone) | PVP |
| Poly(propylenimine) | PPI |
| Poly(amidoamine) | PAMAM |
| Poly(amidoethylenimine) | SS_PAEI |
| Triethylenetetramine | TETA |
| Poly(β-aminoester) | |
| Poly(4-hydroxy-L-proline ester) | PHP |
| Poly(allylamine) | |
| Poly(α-[4-aminobutyl]-L-glycolic acid) | PAGA |
| Poly(D,L-lactic-co-glycolic acid) | PLGA |
| Poly(N-ethyl-4-vinylpyridinium bromide) | |
| Poly(phosphazene)s | PPZ |
| Poly(phosphoester)s | PPE |
| Poly(phosphoramidate)s | PPA |
| Poly(N-2-hydroxypropylmethacrylamide) | pHPMA |
| Poly (2-(dimethylamino)ethyl methacrylate) | pDMAEMA |
| Poly(2-aminoethyl propylene phosphate) | PPE-EA |
| Chitosan | |
| Galactosylated chitosan | |
| N-dodacylated chitosam | |
| Histone | |
| Collagen | |
| Dextran-spermine | D-SPM |

[0496] Exemplary delivery methods for polynucleotides encoding prime editing composition components are shown in Table 10 below.

TABLE 10
Exemplary polynucleotide delivery methods

| | | Delivery into | | | Type of |
|---|---|---|---|---|---|
| | | Non-Dividing | Duration of | Genome | Molecule |
| Delivery | Vector/Mode | Cells | Expression | Integration | Delivered |
| Physical | (e.g., | YES | Transient | NO | Nucleic |
| | electroporation, | | | | Acids and |
| | particle gun, | | | | Proteins |
| | Calcium | | | | |
| | phosphate | | | | |
| | transfection) | | | | |
| Viral | Retrovirus | NO | Stable | YES | RNA |
| | Lentivirus | YES | Stable | YES/NO | RNA |
| | | | | with | |
| | | | | modification | |
| | Adenovirus | YES | Transient | NO | DNA |
| | Adeno- | YES | Stable | NO | DNA |
| | Associated | | | | |
| | Virus (AAV) | | | | |
| | Vaccinia Virus | YES | Very | NO | DNA |
| | | | Transient | | |
| | Herpes | YES | Stable | NO | DNA |
| | Simplex Virus | | | | |
| Non-Viral | Cationic | YES | Transient | Depends | Nucleic |
| | | | | on what is | acids and |
| | | | | delivered | Proteins |
| | Polymeric | YES | Transient | NO | Nucleic |
| | Nanoparticles | | | | Acids |
| Biological | Attenuated | YES | Transient | NO | Nucleic |
| | Bacteria | | | | Acids |
| Non-Viral | Engineered | YES | Transient | NO | Nucleic |
| Delivery | Bacteriophages | | | | Acids |
| Vehicles | Mammalian | YES | Transient | NO | Nucleic |
| | Virus-like | | | | Acids |
| | Particles | | | | |
| | Biological | YES | Transient | NO | Nucleic |
| | liposomes: | | | | Acids |
| | Erythrocyte | | | | |
| | Ghosts and | | | | |
| | Exosomes | | | | |

[0497] The prime editing compositions of the disclosure, whether introduced as polynucleotides or polypeptides, can be provided to the cells for about 30 minutes to about 24 hours, e.g., 1 hour, 1.5 hours, 2 hours, 2.5 hours, 3 hours, 3.5 hours 4 hours, 5 hours, 6 hours, 7 hours, 8 hours, 12 hours, 16 hours, 18 hours, 20 hours, or any other period from about 30 minutes to about 24 hours, which can be repeated with a frequency of about every day to about every 4 days, e.g., every 1.5 days, every 2 days, every 3 days, or any other frequency from about every day to about every four days. The compositions may be provided to the subject cells one or more times, e.g., one time, twice, three times, or more than three times, and the cells allowed to incubate with the agent(s) for some amount of time following each contacting event e.g., 16-24 hours. In cases in which two or more different prime editing system components, e.g., two different polynucleotide constructs are provided to the cell (e.g., different components of the same prim editing system, or two different guide nucleic acids that are complementary to different sequences within the same or different target genes), the compositions may be delivered simultaneously (e.g., as two polypeptides and/or nucleic acids). Alternatively, they may be provided sequentially, e.g., one composition being provided first, followed by a second composition.

[0498] The prime editing compositions and pharmaceutical compositions of the disclosure, whether introduced as polynucleotides or polypeptides, can be administered to subjects in need thereof for about 30 minutes to about 24 hours, e.g., 1 hour, 1.5 hours, 2 hours, 2.5 hours, 3 hours, 3.5 hours 4 hours, 5 hours, 6 hours, 7 hours, 8 hours, 12 hours, 16 hours, 18 hours, 20 hours, or any other period from about 30 minutes to about 24 hours, which can be repeated with a frequency of about every day to about every 4 days, e.g., every 1.5 days, every 2 days, every 3 days, or any other frequency from about every day to about every four days. The compositions may be provided to the subject one or more times, e.g., one time, twice, three times, or more than three times. In cases in which two or more different prime editing system components, e.g., two different polynucleotide constructs are administered to the subject (e.g., different components of the same prime editing system, or two different guide nucleic acids that are complementary to different sequences within the same or different target genes), the compositions may be administered simultaneously (e.g., as two polypeptides and/or nucleic acids). Alternatively, they may be provided sequentially, e.g., one composition being provided first, followed by a second composition.

### Kits

[0499] In certain aspects, the disclosure provides a kit comprising a first polynucleotide and a second polynucleotide. In some embodiments, the first polynucleotide is any polynucleotide herein described and the second polynucleotide is any polynucleotide herein described. In some embodiments, the first and/or second polynucleotide is in any vector as herein described.

[0500] In some embodiments, the vector is an AAV vector.

### EXAMPLES

### Example 1: Split Editor System with NANOBODY®

[0501] Protein fusions via a peptide linker have been shown to have many benefits, including improved stability and increased activity via increasing the local concentration of the components involved in the systems. However, protein linkers can impede activity by forcing unfavorable steric interactions between the protein components and substrates. Unfavorable steric conditions may especially apply to prime editing, where many coordinated actions must occur for successful activity, including multiple conformational changes and substrate turnover. To investigate this possibility, Applicant developed a split prime editing system in which the covalent protein linker in an exemplary prime editor fusion protein (PE2) was replaced with a NANOBODY® peptide system.

[0502] The split prime editing systems were designed to include a portion of the prime editing system fused to a NANOBODY® and a second portion of the prime editing system fused to a target peptide.

[0503] The exemplary split prime editing systems include i) a Cas9 component fused to either to a NANOBODY® or a target peptide and ii) a Moloney Murine Leukemia Virus (MMLV) reverse transcriptase (RT) fused to the corresponding target peptide or NANOBODY®.

[0504] To test if the orientation mattered, the NANOBODY® was fused to either the Cas9 portion or the RT portion of the prime editing system and vice-versa (as shown in FIGS. 1-4).

[0505] The activity of split prime editing systems was tested in mammalian cells. In particular, four different constructs (as shown in FIGS. 1-4) were tested for editing activity of a target gene site. In this example the target gene site was the Fanconi anemia complementation group F (FANCF) gene site in HEK293 cells. The split prime editing system was introduced to the HEK293 cells via a plasmid that expressed a single protein in which the Cas9+Nanobody/peptide and MMLV+peptide/Nanobody polypeptides were fused via a self-cleaving peptide linker. Following expression in the HEK293 cells, cleavage of the self-cleaving peptide linker results in two separate polypeptides, mimicking trans delivery of the split prime editor. The split prime editing NANOBODY® system was observed to efficiently edit the target gene (as shown in FIG. 5).

### INCORPORATION BY REFERENCE

[0506] All publications and patent applications mentioned herein are hereby incorporated by reference in their entirety as if each individual publication or patent application was specifically and individually indicated to be incorporated by reference. In case of conflict, the present application, including any definitions herein, will control.

### EQUIVALENTS

[0507] Those skilled in the art will recognize, or be able to ascertain using no more than routine experimentation, many equivalents to the specific embodiments of the methods and compositions provided herein. Such equivalents are intended to be encompassed by the following claims.

What is claimed is:

1. A split prime editing system:
A) a first polypeptide, or a polynucleotide encoding the first polypeptide, the first polypeptide comprising a DNA binding domain fused to a first affinity moiety selected from:
i) a single-domain antibody sequence, or
ii) a peptide tag; and
B) a second polypeptide, or a polynucleotide encoding the second polynucleotide, the second polynucleotide comprising a DNA polymerase domain fused to a second affinity moiety that is:
i) the peptide tag if the DNA binding domain is fused to the single-domain antibody sequence, or
ii) the single-domain antibody sequence if the DNA binding domain is fused to the peptide tag;
wherein the peptide tag is an antigen for which the single-domain antibody sequence has sufficient affinity to bind under physiological conditions.

2. The system of claim 1, wherein the DNA binding domain comprises an HNH domain and/or a RuvC domain.

3. The system of claim 2, wherein the DNA binding domain comprises both an HNH domain and a RuvC domain.

4. The system of claim 3, wherein the DNA binding protein comprises a mutation that decreases or eliminates nuclease activity in the RuvC domain.

5. The system of claim 1, wherein the DNA binding domain is a Type II Cas protein.

6. The system of claim 5, wherein the Type II Cas protein is a Cas9 protein.

7. The system of claim 6, wherein the Cas9 protein is a Cas9 nickase.

8. The system of claim 1, wherein the DNA binding domain is a Type V Cas protein.

9. The system of claim 1, wherein the DNA binding domain is a Cas12 protein.

10. The system of claim 1, wherein the DNA binding domain has a sequence with at least 80%, 85%, 90%, 95%, 96%, 97%, 98%, or 99% identity to a sequence from Table 14.

11. The system of claim 1, wherein the DNA binding domain has a sequence from Table 14.

12. The system of any one of claims 10-11, wherein the sequence from Table 14 is SEQ ID NO: 8000.

13. The system of any one of claims 1-12, wherein the DNA polymerase domain is a reverse transcriptase domain.

14. The system of claim 13, wherein the reverse transcriptase domain is a Maloney Murine Leukemia Virus (MMLV) reverse transcriptase.

15. The system of any one of claims 1-12, wherein the DNA polymerase domain comprises a sequence with at least 80%, 85%, 90%, 95%, 96%, 97%, 98%, or 99% identity to a sequence from Table 11, Table 12, or Table 13.

16. The system of any one of claims 1-12, wherein the DNA polymerase domain comprises a sequence from Table 11, Table 12, or Table 13.

17. The system of any one of claims 1-14, wherein the DNA polymerase domain comprises a sequence having at least 80%, 85%, 90%, 95%, 96%, 97%, 98%, 99%, or 100% identity to SEQ ID NO: 4448 or SEQ ID NO: 8001.

18. The system of any one of claims 1-17, wherein the single-domain antibody sequence has at least 80%, 85%, 90%, 95%, 96%, 97%, 98%, or 99% identity to SEQ ID NO: 8002.

19. The system of any one of claims 1-17, wherein the single-domain antibody sequence is SEQ ID NO: 8002.

20. The system of any one of claims 1-19, wherein the peptide tag has a sequence from Table 16 or a sequence with 1 or 2 substitutions relative to a sequence from Table 16.

21. The system of any one of claims 1-19, wherein the peptide tag has a sequence from Table 16.

22. The system of any one of claims 1-19, wherein the peptide tag is SEQ ID NO: 8003.

23. The system of any one of claims 1-22, wherein the DNA binding domain is located N-terminally to the first affinity moiety.

24. The system of any one of claims 1-23, further comprising a first peptide linker between the DNA binding domain and the first affinity moiety.

25. The system of claim 24, wherein the first peptide linker comprises a sequence from Table 15.

26. The system of any one of claims 1-25, wherein the DNA polymerase domain is located C-terminally to the second affinity moiety.

27. The system of any one of claims 1-26, further comprising a second peptide linker between the DNA polymerase domain and the second affinity moiety.

28. The system of claim 27, wherein the second peptide linker comprises a sequence from Table 15.

29. The system of any one of claims 1-28, wherein the first polypeptide further comprises one or more nuclear localization sequences (NLSs).

30. The system of claim 29, wherein the first polypeptide comprises a C-terminal and an N-terminal NLS.

31. The system of claim 30, further comprising a peptide linker between the N-terminal NLS and the DNA binding protein.

32. The system of claim 30 or 31, further comprising a peptide linker between the C-terminal NLS and the first binding moiety.

33. The system of any one of claims 1-32, wherein the second polypeptide further comprises one or more nuclear localization sequences (NLSs).

34. The system of claim 33, wherein the second polypeptide comprises a C-terminal and an N-terminal NLS.

35. The system of claim 34, further comprising a peptide linker between the C-terminal NLS and the DNA polymerase domain.

36. The system of claim 33 or 34, further comprising a peptide linker between the N-terminal NLS and the second binding moiety.

37. The system of any one of claims 29-36, wherein the NLSs have, individually, a sequence selected from Table 3 or a sequence having one or two substitutions relative to a sequence from Table 3.

38. The system of any one of claims 31-36, wherein the peptide linkers have, individually, a sequence selected from Table 15 or a sequence having at least 80%, 85%, 90%, 95%, 96%, 97%, 98%, or 99% identity with a sequence from Table 15.

39. The system of any one of claims 1-38, wherein the first polypeptide and the second polypeptide comprise compatible sequences from Table 21 or Table 20 or sequences having at least 80%, 85%, 90%, 95%, 96%, 97%, 98%, or 99% identity with compatible sequence from Table 21 or Table 20.

40. The system of any one of claims 1-39, further comprising a self-cleaving peptide joining the first polypeptide to the second polypeptide.

41. The system of claim 40, wherein the self-cleaving peptide comprises a sequence from Table 19 or a sequence having one or two substitutions relative to a sequence from Table 19.

42. The system of claim 40, wherein the self-cleaving peptide comprises SEQ ID NO: 8004.

43. The system of any one of claims 40-42, comprising a sequence having 80%, 85%, 90%, 95%, 96%, 97%, 98%, or 99% identity relative to a sequence from Table 18.

44. The system of any one of claims 40-42, comprising a sequence selected from Table 18.

45. The system of claim 43 or 44, wherein the sequence from Table 18 is SEQ ID NO: 8005.

46. A prime editor system comprising a split prime editor comprising a DNA binding domain and a DNA polymerase domain, wherein the split prime editor comprises a first polypeptide comprising a first amino acid sequence and a second polypeptide comprising a second amino acid sequence.

47. The prime editor system of claim 46, wherein the first amino acid sequence forms at least a portion of the DNA binding domain.

48. The prime editor system of claim 46 or claim 47, wherein the second amino acid sequence forms at least a portion of the DNA polymerase domain.

49. The prime editor system of claim 47 or claim 48, wherein the first amino acid sequence forms the DNA binding domain.

50. The prime editor system of claim 49, wherein the first amino acid sequence forms the DNA binding domain and a portion of the DNA polymerase domain.

51. The prime editor system of claim 47 or claim 48, wherein the second amino acid sequence forms the DNA polymerase domain.

52. The prime editor system of claim 51, wherein the second amino acid sequence forms the DNA polymerase domain and a portion of the DNA binding domain.

53. The prime editor system of claim 46, wherein the first amino acid sequence forms at least a portion of the DNA polymerase domain.

54. The prime editor system of claim 46 or claim 53, wherein the second amino acid sequence forms at least a portion of the DNA binding domain.

55. The prime editor system of claim 53 or claim 54, wherein the first amino acid sequence forms the DNA polymerase domain.

56. The prime editor system of claim 55, wherein the first amino acid sequence forms the DNA polymerase domain and a portion of the DNA binding domain.

57. The prime editor system of claim 53 or claim 54, wherein the second amino acid sequence forms the DNA binding domain.

58. The prime editor system of claim 57, wherein the second amino acid sequence forms the DNA binding domain and a portion of the DNA polymerase domain.

59. The prime editor system of any one of claims 46 to 58, wherein the first polypeptide and the second polypeptide are configured to passively assemble in a host cell to form the split prime editor.

60. The prime editor system of any one of claims 46 to 58, wherein the first polypeptide has affinity for the second polypeptide.

61. The prime editor system of any one of claims 46 to 58, wherein the second polypeptide has affinity for the first polypeptide.

62. The prime editor system of claim 60 or claim 61, wherein the first polypeptide comprises a single-domain antibody.

63. The prime editor system of claim 62, wherein the single-domain antibody comprises an amino acid sequence as set forth in Table 17.

64. The prime editor system of claim 62 or claim 63, wherein the second polypeptide comprises a peptide tag that is configured to be bound by the single domain antibody.

65. The prime editor system of claim 64, wherein the peptide tag comprises a SpotTag® or a BC2 tag.

66. The prime editor system of claim 64, wherein the peptide tag comprises an amino acid sequence as set forth in Table 16.

67. The prime editor system of claim 60 or 61, wherein the first polypeptide comprises a peptide tag that is configured to bind to a single domain antibody.

68. The prime editor system of claim 67, wherein the peptide tag comprises a SpotTag® or a BC2 tag.

69. The prime editor system of claim 67, wherein the peptide tag comprises an amino acid sequence as set forth in Table 16.

70. The prime editor system of any one of claims 67 to 69, wherein the second polypeptide comprises a single-domain antibody.

71. The prime editor system of claim 70, wherein the single-domain antibody comprises an amino acid sequence as set forth in Table 17.

72. The prime editor system of any one of claims 62 to 71, wherein the single-domain antibody is a NANOBODY®.

73. The prime editor system of any one of claims 46 to 58, wherein the split prime editor further comprises an affinity moiety that has affinity for either the DNA binding domain or the DNA polymerase domain.

74. The prime editor system of claim 73, wherein the affinity moiety has affinity for the DNA binding domain.

75. The prime editor system of claim 73, wherein the affinity moiety has affinity for the DNA polymerase domain.

76. The prime editor system of claim 73, wherein the DNA binding domain comprises a peptide tag that is configured to bind to the affinity moiety and the DNA polymerase domain comprises the affinity moiety.

77. The prime editor system of claim 73, wherein the DNA binding domain comprises the affinity moiety and the DNA polymerase domain comprises a peptide tag that is configured to bind to the affinity moiety.

78. The prime editor system of any one of claims 73-77, wherein the affinity moiety comprises an antibody or fragment thereof.

79. The prime editor system of any one of claims 73-78, wherein the affinity moiety comprises a single-domain antibody.

80. The prime editor system of claim 79, wherein the single-domain antibody or fragment thereof is a NANOBODY®.

81. The prime editor system of claim 79 or claim 80, wherein the single-domain antibody comprises any one of the amino acid sequences as set forth in Table 17.

82. The prime editor system of any one of claims 73 to 75, wherein the affinity moiety is fused to the first polypeptide and has affinity for the second amino acid sequence.

83. The prime editor system of any one of claims 73 to 75, wherein the affinity moiety is fused to the second polypeptide and has affinity for the first amino acid sequence.

84. The prime editor system of any one of claims 1 to 73, wherein the first polypeptide comprises a C-terminal intein sequence.

85. The prime editor system of claim 84, wherein the second polypeptide comprises a N-terminal intein sequence.

86. The prime editor system of claim 85, wherein assembly of the first polypeptide and the second polypeptide in a host cell results in fusion of the C-terminal intein sequence and the N-terminal intein sequence to generate a full intein sequence, which then results in splicing and excision of the full intein sequence.

87. The prime editor system of any one of claims 46 to 58, wherein the first polypeptide comprises a first affinity moiety and the second polypeptide comprises a second affinity moiety.

88. The prime editor system of claim 87, wherein the first affinity moiety has affinity for the second affinity moiety.

89. The prime editor system of claim 87 or claim 88, wherein the first affinity moiety comprises a C-terminal leucine zipper monomer.

90. The prime editor system of claim 89, wherein the second affinity moiety comprises an N-terminal leucine zipper monomer.

91. The prime editor system of claim 90, wherein the C-terminal leucine zipper monomer and the N-terminal leucine zipper monomer forms a dimer in a host cell.

92. The prime editor system of claim 87 or 88, wherein the first affinity moiety comprises a C-terminal dimerization domain.

93. The prime editor system of claim 92, wherein the second affinity moiety comprises a N-terminal dimerization domain.

94. The prime editor system of claim 93, wherein the C-terminal dimerization domain and the N-terminal dimerization domain form a dimer in a host cell.

95. The prime editor system of any one of claims 46 to 94, wherein the prime editor system comprises a scaffold RNA.

96. The prime editor system of claim 95, wherein the first polypeptide and/or the second polypeptide comprises an adapter protein that has affinity for the scaffold RNA.

97. The prime editor system of claim 96, wherein the adapter protein is selected from one or more of a MS2 coat/adapter protein (MCP), a PP7 adapter protein, a Qβ adapter protein, a F2 adapter protein, a GA adapter protein, a fr adapter protein, a JP501 adapter protein, a M12 adapter protein, a R17 adapter protein, a BZ13 adapter protein, a JP34 adapter protein, a JP500 adapter protein, a KU1 adapter protein, a M11 adapter protein, a MX1 adapter protein, a TW18 adapter protein, a VK adapter protein, a SP adapter protein, a FI adapter protein, a ID2 adapter protein, a NL95 adapter protein, a TW19 adapter protein, a AP205 adapter protein, a ϕCb5 adapter protein, a ϕCb8r adapter protein, a ϕ12r adapter protein, a ϕCb23r adapter protein, a 7s adapter protein and a PRR1 adapter protein.

98. The prime editor system of any one of claims 46 to 58, further comprising a scaffold protein that has affinity for the first polypeptide and/or the second polypeptide.

99. The prime editor system of claim 98, wherein the scaffold protein is fused to the first polypeptide or the second polypeptide.

100. The prime editor system of claim 98, wherein the scaffold protein is not fused to either the first polypeptide or the second polypeptide.

101. The prime editor system of any one of claims 98 to 100, further comprising a second scaffold protein that has affinity for the scaffold protein.

102. The prime editor system of claim 101, wherein the second scaffold protein has affinity for the first polypeptide.

103. The prime editor system of claim 101 or 102, wherein the second scaffold protein has affinity for to the second polypeptide.

104. The prime editor system of any one of claims 101 to 103, wherein the second scaffold protein is fused to the first polypeptide or the second polypeptide.

105. The prime editor system of any one of claims 101 to 104, wherein the second scaffold protein is not fused to either the first polypeptide or the second polypeptide.

106. The prime editor system of any one of claims 46 to 58, wherein the first polypeptide has affinity for an endogenous protein in a host cell.

107. The prime editor system of claim 106, wherein the second polypeptide has affinity for the endogenous protein in a host cell.

108. The prime editor system of any one of claims 46 to 58, wherein the first polypeptide has affinity for a first endogenous protein in a host cell and the second polypeptide has affinity for a second endogenous protein in a host cell, and the first endogenous protein has affinity for the second endogenous protein.

109. The prime editor system of any one of claims 46 to 58, wherein the first polypeptide is configured to become covalently attached to the second polypeptide in a host cell.

110. The prime editor system of claim 109, wherein the first polypeptide comprises a SpyTag peptide sequence and the second polypeptide comprises a SpyCatcher peptide sequence.

111. The prime editor system of claim 109, wherein the first polypeptide comprises a SnoopTag peptide sequence and the second polypeptide comprises a SnoopCatcher peptide sequence.

112. The prime editor system of claim 109, wherein the first polypeptide comprises a SdyTag peptide sequence and the second polypeptide comprises a SdyCatcher peptide sequence.

113. The prime editor system of claim 109, wherein the first polypeptide comprises a DogTag peptide sequence and the second polypeptide comprises a DogCatcher peptide sequence.

114. The prime editor system of claim 109, wherein the first polypeptide comprises a SpyTag peptide sequence and the second polypeptide comprises a SpyDock peptide sequence.

115. The prime editor system of claim 109, wherein the first polypeptide comprises an isopeptag peptide sequence and the second polypeptide comprises a Pilin-C peptide sequence.

116. The prime editor system of any one of claims 46-115, wherein the split prime editor comprises a third polypeptide encoding a third amino acid sequence.

117. The prime editor system of claim 116, wherein the third amino acid sequence forms at least a portion of the DNA binding domain and/or the DNA polymerase domain.

118. The prime editor system of any one of claims 46 to 117, wherein the DNA binding domain comprises a CRISPR associated (Cas) protein domain.

119. The prime editor system of claim 118, wherein the Cas protein domain has nickase activity.

120. The prime editor system of claim 119, wherein the Cas protein domain is a Cas9.

121. The prime editor system of claim 120, wherein the Cas9 comprises a mutation in an HNH domain.

122. The prime editor system of claim 120, wherein the Cas9 comprises a H840A mutation in the HNH domain.

123. The prime editor system of claim 118, wherein the Cas protein domain is a Cas12b.

124. The prime editor system of claim 118, wherein the Cas protein domain is a Cas12a, Cas12b, Cas12c, Cas12d, Cas12e, Cas14a, Cas14b, Cas14c, Cas14d, Cas14e, Cas14f, Cas14g, Cas14h, Cas14u, or a Casφ.

125. The prime editor system of claim 118, wherein the Cas protein domain comprises any one of the amino acid sequences as set forth in Table 14.

126. The prime editor system of any one of claims 46 to 125, wherein the DNA polymerase domain comprises a reverse transcriptase.

127. The prime editor system of claim 126, wherein the reverse transcriptase is a retrovirus reverse transcriptase.

128. The prime editor system of claim 126, wherein the reverse transcriptase is a Moloney murine leukemia virus (M-MLV) reverse transcriptase.

129. The prime editor system of claim 126, wherein the reverse transcriptase comprises any one of the sequences as set forth in Table 11, Table 12, or Table 13.

130. The prime editor system of any one of claims 46 to 129, wherein the first polypeptide comprises at least one peptide linker.

131. The prime editor system of claim 130, wherein the first polypeptide comprises at least two peptide linkers.

132. The prime editor system of any one of claims 46 to 131, wherein the second polypeptide comprises at least one peptide linker.

133. The prime editor system of claim 132, wherein the second polypeptide comprises at least two peptide linkers.

134. The prime editor system of claim 130 or 132, wherein the at least one peptide linker comprises 5 to 100 amino acids.

135. The prime editor system of claim 130 or 132, wherein the at least one peptide linker comprises an amino acid sequence as set forth in Table 15.

136. The prime editor system of any one of claims 46 to 135, wherein the first polypeptide further comprises at least one nuclear localization sequence.

137. The prime editor system of any one of claims 46 to 135, wherein the second polypeptide further comprises at least one nuclear localization sequence.

138. The prime editor system of claim 136 or 137, wherein the at least one nuclear localization sequence comprises an amino acid sequence as set forth in Table 3.

139. The prime editor system of any one of claims 46 to 138, wherein the first polypeptide and the second polypeptide are joined by a self-cleaving peptide.

140. The prime editor system of claim 139, wherein the self-cleaving peptide is a P2A peptide.

141. The prime editor system of claim 140, wherein the P2A peptide comprises a sequence set forth in SEQ ID NO: 8004.

142. The prime editor system of claim 141, wherein the prime editor comprises an amino acid sequence as set forth in Table 18.

143. A lipid nanoparticle (LNP) or ribonucleoprotein (RNP) comprising the prime editing system of any one of claims 46 to 142, or a component thereof.

144. A polynucleotide encoding the prime editor of any one of claims 46 to 142.

145. The polynucleotide of claim 144, wherein the polynucleotide is operably linked to a regulatory element.

146. The polynucleotide of claim 145, wherein the regulatory element is an inducible regulatory element.

147. A vector comprising the polynucleotide of any one of claims 144 to 146.

148. The vector of claim 147, wherein the vector is an AAV vector.

149. A polynucleotide encoding the first polypeptide of any one of claims 46 to 142.

150. The polynucleotide of claim 149, wherein the polynucleotide is operably linked to a regulatory element.

151. The polynucleotide of claim 150, wherein the regulatory element is an inducible regulatory element.

152. A vector comprising the polynucleotide of any one of claims 144 to 151.

153. The vector of claim 152, wherein the vector is an AAV vector, such as a trans-splicing vector.

154. A polynucleotide encoding the second polypeptide of any one of claims 46 to 142.

155. The polynucleotide of claim 154, wherein the polynucleotide is operably linked to a regulatory element.

156. The polynucleotide of claim 155, wherein the regulatory element is an inducible regulatory element.

157. A vector comprising the polynucleotide of any one of claims 154 to 156.

158. The vector of claim 157, wherein the vector is an AAV vector, such as a trans-splicing vector.

159. A kit comprising a first polynucleotide and a second polynucleotide, wherein the first polynucleotide is a polynucleotide of any one of claims 149-151 and the second polynucleotide is a polynucleotide of any one of claims 154-156.

160. The kit of claim 159, wherein the first polynucleotide and/or the second polynucleotide is in a vector.

161. The kit of claim 160, wherein the vector is an AAV vector.

162. The kit of claim 161, wherein the vector is an AAV trans-splicing vector.

163. An isolated cell comprising the prime editor system of any one of claims 1 to 142, the LNP or RNP of claim 143, the polynucleotide of any one of claims 144 to 146, 149 to 151, or 154 to 156, or the vector of any one of claim 147-148, 152-153, or 157-158.

164. The isolated cell of claim 163, wherein the cell is a human cell.

165. A pharmaceutical composition comprising i) the prime editor system of any one of claims 1 to 142, the LNP or RNP of claim 143, the polynucleotide of any one of claims 144 to 146, 149 to 151, or 154 to 156, or the vector of any one of claim 147-148, 152-153, or 157-158; and (ii) a pharmaceutically acceptable carrier.

166. The prime editor system of any one of claims 1-142, further comprising a prime editor guide RNA (a PERNA).

167. A method for editing a gene, the method comprising contacting the gene with a prime editor system of claim 166, wherein the PEgRNA directs the prime editor to incorporate the intended nucleotide edit in the gene, thereby editing the gene.

168. The method of claim 167, wherein the prime editor synthesizes a single stranded DNA encoded by an editing template, wherein the single stranded DNA replaces an editing target sequence and results in incorporation of the intended nucleotide edit into a region corresponding to the editing target sequence in the gene.

169. The method of claim 167 or 168, wherein the gene is in a cell.

170. The method of claim 169, wherein the cell is a mammalian cell.

171. The method of claim 169, wherein the cell is a human cell.

172. The method of any one of claims 169-171, wherein the cell is in a subject.

173. The method of claim 172, wherein the subject is a human.

174. The method of any one of claims 169-171, further comprising administering the cell to a subject after incorporation of the intended nucleotide edit.

The application's sequence listing, which the Patent Office published only in electronic form, follows.

SEQUENCE LISTING (8784 sequences)

SEQ ID NO: 1 - RNA, 22 nt, synthetic construct
  source 1..22: mol_type = other RNA
cgggtctctacgtgggggcccg

SEQ ID NO: 2 - RNA, 22 nt, synthetic construct
  source 1..22: mol_type = other RNA
cgcgtctctacgtgggggcgcg

SEQ ID NO: 3 - RNA, 14 nt, synthetic construct
  source 1..14: mol_type = other RNA
ggcgcgaaagcgcc

SEQ ID NO: 4 - RNA, 22 nt, synthetic construct
  source 1..22: mol_type = other RNA
gcggcaccgtccgcccaaacgg

SEQ ID NO: 5 - RNA, 18 nt, synthetic construct
  source 1..18: mol_type = other RNA
gcccggcgaaagccgggc

SEQ ID NO: 6 - RNA, 18 nt, synthetic construct
  source 1..18: mol_type = other RNA
gcccggcttcggccgggc

SEQ ID NO: 7 - RNA, 14 nt, synthetic construct
  source 1..14: mol_type = other RNA
ggcgcttcggcgcc

SEQ ID NO: 8 - RNA, 33 nt, synthetic construct
  source 1..33: mol_type = other RNA
ttaccacgcgctcttaactgctagcgccatggc

SEQ ID NO: 9 - RNA, 19 nt, synthetic construct
  source 1..19: mol_type = other RNA
acatgaggatcacccatgt

SEQ ID NO: 10 - RNA, 18 nt, synthetic construct
  source 1..18: mol_type = other RNA
gggcgggccgggggcggg

SEQ ID NO: 11 - RNA, 18 nt, synthetic construct
  source 1..18: mol_type = other RNA
ccccgccccggccgcccc

SEQ ID NO: 12 - RNA, 61 nt, synthetic construct
  source 1..61: mol_type = other RNA
gctcctctgattgactacccgtcagcgggggtcttttgggggctcgtccgggatcgggagt

SEQ ID NO: 13 - RNA, 61 nt, synthetic construct
  source 1..61: mol_type = other RNA
actcccgatcccggacgagcccccaaaagacccccgctgacgggtagtcaatcagaggagc

SEQ ID NO: 14 - RNA, 18 nt, synthetic construct
  source 1..18: mol_type = other RNA
tgggggctcgtccgggat

SEQ ID NO: 15 - RNA, 18 nt, synthetic construct
  source 1..18: mol_type = other RNA
atcccggacgagccccca

SEQ ID NO: 16 - RNA, 76 nt, synthetic construct
  source 1..76: mol_type = other RNA
gttttagagctagaaatagcaagttaaaataaggctagtccgttatcaacttgaaaaagtggcaccgagtcggtgc

SEQ ID NO: 17 - RNA, 76 nt, synthetic construct
  source 1..76: mol_type = other RNA
gatttagagctagaaatagcaagttaaattaaggctagtccgttatcaacttgaaaaagtggcaccgagtcggtgc

SEQ ID NO: 18 - RNA, 76 nt, synthetic construct
  source 1..76: mol_type = other RNA
gtattagagctagaaatagcaagttaatataaggctagtccgttatcaacttgaaaaagtggcaccgagtcggtgc

SEQ ID NO: 19 - RNA, 76 nt, synthetic construct
  source 1..76: mol_type = other RNA
gttatagagctagaaatagcaagttataataaggctagtccgttatcaacttgaaaaagtggcaccgagtcggtgc

SEQ ID NO: 20 - RNA, 76 nt, synthetic construct
  source 1..76: mol_type = other RNA
gtttaagagctagaaatagcaagtttaaataaggctagtccgttatcaacttgaaaaagtggcaccgagtcggtgc

SEQ ID NO: 21 - RNA, 76 nt, synthetic construct
  source 1..76: mol_type = other RNA
gttttagagctagaaatagcaagttaaaataaggctagtccgttatcaactggaaacagtggcaccgagtcggtgc

SEQ ID NO: 22 - RNA, 76 nt, synthetic construct
  source 1..76: mol_type = other RNA
gttttagagctagaaatagcaagttaaaataaggctagtccgttatcaactcgaaagagtggcaccgagtcggtgc

SEQ ID NO: 23 - RNA, 86 nt, synthetic construct
  source 1..86: mol_type = other RNA
gttttagagctatgctggaaacagcatagcaagttaaaataaggctagtccgttatcaacttgaaaaagtggcaccgagtcggtgc

SEQ ID NO: 24 - RNA, 86 nt, synthetic construct
  source 1..86: mol_type = other RNA
gtttaagagctatgctggaaacagcatagcaagtttaaataaggctagtccgttatcaacttgaaaaagtggcaccgagtcggtgc

SEQ ID NO: 25 - RNA, 76 nt, synthetic construct
  source 1..76: mol_type = other RNA
gtttaagagctagaaatagcaagtttaaataaggctagtccgttatcagcgtgaaaacgcggcaccgagtcggtgc

SEQ ID NO: 26 - RNA, 78 nt, synthetic construct
  source 1..78: mol_type = other RNA
gtttaagagctacgaaagtagcaagtttaaataaggctagtccgttatcaacttgaaaaagtggcaccgagtcggtgc

SEQ ID NO: 27 - RNA, 80 nt, synthetic construct
  source 1..80: mol_type = other RNA
gtttaagagctaccgaaaggtagcaagtttaaataaggctagtccgttatcaacttgaaaaagtggcaccgagtcggtgc

SEQ ID NO: 28 - RNA, 80 nt, synthetic construct
  source 1..80: mol_type = other RNA
gtttaagagctacagaaatgtagcaagtttaaataaggctagtccgttatcaacttgaaaaagtggcaccgagtcggtgc

SEQ ID NO: 29 - RNA, 80 nt, synthetic construct
  source 1..80: mol_type = other RNA
gtttaagagctacggaaatgtagcaagtttaaataaggctagtccgttatcaacttgaaaaagtggcaccgagtcggtgc

SEQ ID NO: 30 - RNA, 78 nt, synthetic construct
  source 1..78: mol_type = other RNA
gtttaagagctaagaaattagcaagtttaaataaggctagtccgttatcaacttgaaaaagtggcaccgagtcggtgc

SEQ ID NO: 31 - RNA, 80 nt, synthetic construct
  source 1..80: mol_type = other RNA
gtttaagagctaacgaaagttagcaagtttaaataaggctagtccgttatcaacttgaaaaagtggcaccgagtcggtgc

SEQ ID NO: 32 - RNA, 80 nt, synthetic construct
  source 1..80: mol_type = other RNA
gtttaagagctaaagaaatttagcaagtttaaataaggctagtccgttatcaacttgaaaaagtggcaccgagtcggtgc

SEQ ID NO: 33 - RNA, 80 nt, synthetic construct
  source 1..80: mol_type = other RNA
gtttaagagctaaggaaatttagcaagtttaaataaggctagtccgttatcaacttgaaaaagtggcaccgagtcggtgc

SEQ ID NO: 34 - RNA, 82 nt, synthetic construct
  source 1..82: mol_type = other RNA
gtttaagagctacccgaaagggtagcaagtttaaataaggctagtccgttatcaacttgaaaaagtggcaccgagtcggtgc

SEQ ID NO: 35 - RNA, 84 nt, synthetic construct
  source 1..84: mol_type = other RNA
gtttaagagctaccacgaaagtggtagcaagtttaaataaggctagtccgttatcaacttgaaaaagtggcaccgagtcggtgc

SEQ ID NO: 36 - RNA, 86 nt, synthetic construct
  source 1..86: mol_type = other RNA
gtttaagagctaccaacgaaagttggtagcaagtttaaataaggctagtccgttatcaacttgaaaaagtggcaccgagtcggtgc

SEQ ID NO: 37 - RNA, 88 nt, synthetic construct
  source 1..88: mol_type = other RNA
gtttaagagctaccacacgaaagtgtggtagcaagtttaaataaggctagtccgttatcaacttgaaaaagtggcaccgagtcggtgc

SEQ ID NO: 38 - RNA, 78 nt, synthetic construct
  source 1..78: mol_type = other RNA
gtttaagagctagaaatagcaagtttaaataaggctagtccgttatcaacttcgaaagaagtggcaccgagtcggtgc

SEQ ID NO: 39 - RNA, 80 nt, synthetic construct
  source 1..80: mol_type = other RNA
gtttaagagctagaaatagcaagtttaaataaggctagtccgttatcaacttccgaaaggaagtggcaccgagtcggtgc

SEQ ID NO: 40 - RNA, 80 nt, synthetic construct
  source 1..80: mol_type = other RNA
gtttaagagctagaaatagcaagtttaaataaggctagtccgttatcaacttcagaaatgaagtggcaccgagtcggtgc

SEQ ID NO: 41 - RNA, 80 nt, synthetic construct
  source 1..80: mol_type = other RNA
gtttaagagctagaaatagcaagtttaaataaggctagtccgttatcaacttcggaaatgaagtggcaccgagtcggtgc

SEQ ID NO: 42 - RNA, 78 nt, synthetic construct
  source 1..78: mol_type = other RNA
gtttaagagctagaaatagcaagtttaaataaggctagtccgttatcaacttagaaataagtggcaccgagtcggtgc

SEQ ID NO: 43 - RNA, 80 nt, synthetic construct
  source 1..80: mol_type = other RNA
gtttaagagctagaaatagcaagtttaaataaggctagtccgttatcaacttacgaaagtaagtggcaccgagtcggtgc

SEQ ID NO: 44 - RNA, 80 nt, synthetic construct
  source 1..80: mol_type = other RNA
gtttaagagctagaaatagcaagtttaaataaggctagtccgttatcaacttaagaaattaagtggcaccgagtcggtgc

SEQ ID NO: 45 - RNA, 80 nt, synthetic construct
  source 1..80: mol_type = other RNA
gtttaagagctagaaatagcaagtttaaataaggctagtccgttatcaacttaggaaattaagtggcaccgagtcggtgc

SEQ ID NO: 46 - RNA, 82 nt, synthetic construct
  source 1..82: mol_type = other RNA
gtttaagagctagaaatagcaagtttaaataaggctagtccgttatcaacttcccgaaagggaagtggcaccgagtcggtgc

SEQ ID NO: 47 - RNA, 84 nt, synthetic construct
  source 1..84: mol_type = other RNA
gtttaagagctagaaatagcaagtttaaataaggctagtccgttatcaacttccacgaaagtggaagtggcaccgagtcggtgc

SEQ ID NO: 48 - RNA, 86 nt, synthetic construct
  source 1..86: mol_type = other RNA
gtttaagagctagaaatagcaagtttaaataaggctagtccgttatcaacttccaacgaaagttggaagtggcaccgagtcggtgc

SEQ ID NO: 49 - RNA, 88 nt, synthetic construct
  source 1..88: mol_type = other RNA
gtttaagagctagaaatagcaagtttaaataaggctagtccgttatcaacttccacacgaaagtgtggaagtggcaccgagtcggtgc

SEQ ID NO: 50 - RNA, 78 nt, synthetic construct
  source 1..78: mol_type = other RNA
gtttaagagctagaaatagcaagtttaaataaggctagtccgttatcaacttgaaaaagtggcaccgcagtgcggtgc

SEQ ID NO: 51 - RNA, 80 nt, synthetic construct
  source 1..80: mol_type = other RNA
gtttaagagctagaaatagcaagtttaaataaggctagtccgttatcaacttgaaaaagtggcaccgccagtggcggtgc

SEQ ID NO: 52 - RNA, 80 nt, synthetic construct
  source 1..80: mol_type = other RNA
gtttaagagctagaaatagcaagtttaaataaggctagtccgttatcaacttgaaaaagtggcaccgcaagttgcggtgc

SEQ ID NO: 53 - RNA, 80 nt, synthetic construct
  source 1..80: mol_type = other RNA
gtttaagagctagaaatagcaagtttaaataaggctagtccgttatcaacttgaaaaagtggcaccgcgagttgcggtgc

SEQ ID NO: 54 - RNA, 78 nt, synthetic construct
  source 1..78: mol_type = other RNA
gtttaagagctagaaatagcaagtttaaataaggctagtccgttatcaacttgaaaaagtggcaccgaagttcggtgc

SEQ ID NO: 55 - RNA, 80 nt, synthetic construct
  source 1..80: mol_type = other RNA
gtttaagagctagaaatagcaagtttaaataaggctagtccgttatcaacttgaaaaagtggcaccgacagtgtcggtgc

SEQ ID NO: 56 - RNA, 80 nt, synthetic construct
  source 1..80: mol_type = other RNA
gtttaagagctagaaatagcaagtttaaataaggctagtccgttatcaacttgaaaaagtggcaccgaaagtttcggtgc

SEQ ID NO: 57 - RNA, 80 nt, synthetic construct
  source 1..80: mol_type = other RNA
gtttaagagctagaaatagcaagtttaaataaggctagtccgttatcaacttgaaaaagtggcaccgagagtttcggtgc

SEQ ID NO: 58 - RNA, 82 nt, synthetic construct
  source 1..82: mol_type = other RNA
gtttaagagctagaaatagcaagtttaaataaggctagtccgttatcaacttgaaaaagtggcaccgcccagtgggcggtgc

SEQ ID NO: 59 - RNA, 84 nt, synthetic construct
  source 1..84: mol_type = other RNA
gtttaagagctagaaatagcaagtttaaataaggctagtccgttatcaacttgaaaaagtggcaccgccacagtgtggcggtgc

SEQ ID NO: 60 - RNA, 86 nt, synthetic construct
  source 1..86: mol_type = other RNA
gtttaagagctagaaatagcaagtttaaataaggctagtccgttatcaacttgaaaaagtggcaccgccaacagtgttggcggtgc

SEQ ID NO: 61 - RNA, 88 nt, synthetic construct
  source 1..88: mol_type = other RNA
gtttaagagctagaaatagcaagtttaaataaggctagtccgttatcaacttgaaaaagtggcaccgccacacagtgtgtggcggtgc

SEQ ID NO: 62-4445 - skipped (4384 entries)

SEQ ID NO: 4446 - RNA, 33 nt, synthetic construct
  source 1..33: mol_type = other RNA
gccaacatgaggatcacccatgtctgcagggcc

SEQ ID NO: 4447 - protein, 131 aa, synthetic construct
GSASNFTQFVLVDNGGTGDVTVAPSNFANGVAEWISSNSRSQAYKVTCSVRQSSAQNRKYTIKVEVPKVATQTVGGEELPVAGWRSYLNMELTIPIFATNSDCELIVKAMQGLLKDGNPIPSAIAANSGIY

SEQ ID NO: 4448 - protein, 677 aa, Moloney murine leukemia virus
TLNIEDEYRLHETSKEPDVSLGSTWLSDFPQAWAETGGMGLAVRQAPLIIPLKATSTPVSIKQYPMSQEARLGIKPHIQRLLDQGILVPCQSPWNTPLLPVKKPGTNDYRPVQDLREVNKRVEDIHPTVPNPYNLLSGLPPSHQWYTVLDLKDAFFCLRLHPTSQPLFAFEWRDPEMGISGQLTWTRLPQGFKNSPTLFDEALHRDLADFRIQHPDLILLQYVDDLLLAATSELDCQQGTRALLQTLGNLGYRASAKKAQICQKQVKYLGYLLKEGQRWLTEARKETVMGQPTPKTPRQLREFLGTAGFCRLWIPGFAEMAAPLYPLTKTGTLFNWGPDQQKAYQEIKQALLTAPALGLPDLTKPFELFVDEKQGYAKGVLTQKLGPWRRPVAYLSKKLDPVAAGWPPCLRMVAAIAVLTKDAGKLTMGQPLVILAPHAVEALVKQPPDRWLSNARMTHYQALLLDTDRVQFGPVVALNPATLLPLPEEGLQHNCLDILAEAHGTRPDLTDQPLPDADHTWYTDGSSLLQEGQRKAGAAVTTETEVIWAKALPAGTSAQRAELIALTQALKMAEGKKLNVYTDSRYAFATAHIHGEIYRRRGLLTSEGKEIKNKDEILALLKALFLPKRLSIIHCPGHQKGHSAEARGNRMADQAARKAAITETPDTSTLLIENSSP

SEQ ID NO: 4449 - protein, 1368 aa, Streptococcus pyogenes [sequence omitted]

SEQ ID NO: 4450 - protein, 1052 aa, Staphylococcus lugdunensis
MKRNYILGLDIGITSVGYGIIDYETRDVIDAGVRLFKEANVENNEGRRSKRGARRLKRRRRHRIQRVKKLLFDYNLLTDHSELSGINPYEARVKGLSQKLSEEEFSAALLHLAKRRGVHNVNEVEEDTGNELSTKEQISRNSKALEEKYVAELQLERLKKDGEVRGSINRFKTSDYVKEAKQLLKVQKAYHQLDQSFIDTYIDLLETRRTYYEGPGEGSPFGWKDIKEWYEMLMGHCTYFPEELRSVKYAYNADLYNALNDLNNLVITRDENEKLEYYEKFQIIENVFKQKKKPTLKQIAKEILVNEEDIKGYRVTSTGKPEFTNLKVYHDIKDITARKEIIENAELLDQIAKILTIYQSSEDIQEELTNLNSELTQEEIEQISNLKGYTGTHNLSLKAINLILDELWHTNDNQIAIFNRLKLVPKKVDLSQQKEIPTTLVDDFILSPVVKRSFIQSIKVINAIIKKYGLPNDIIIELAREKNSKDAQKMINEMQKRNRQTNERIEEIIRTTGKENAKYLIEKIKLHDMQEGKCLYSLEAIPLEDLLNNPFNYEVDHIIPRSVSFDNSFNNKVLVKQEEASKKGNRTPFQYLSSSDSKISYETFKKHILNLAKGKGRISKTKKEYLLEERDINRFSVQKDFINRNLVDTRYATRGLMNLLRSYFRVNNLDVKVKSINGGFTSFLRRKWKFKKERNKGYKHHAEDALIIANADFIFKEWKKLDKAKKVMENQMFEEKQAESMPEIETEQEYKEIFITPHQIKHIKDFKDYKYSHRVDKKPNRELINDTLYSTRKDDKGNTLIVNNLNGLYDKDNDKLKKLINKSPEKLLMYHHDPQTYQKLKLIMEQYGDEKNPLYKYYEETGNYLTKYSKKDNGPVIKKIKYYGNKLNAHLDITDDYPNSRNKVVKLSLKPYRFDVYLDNGVYKFVTVKNLDVIKKENYYEVNSKCYEEAKKLKKISNQAEFIASFYNNDLIKINGELYRVIGVNNDLLNRIEVNMIDITYREYLENMNDKRPPRIIKTIASKTQSIKKYSTDILGNLYEVKSKKHPQIIKK

SEQ ID NO: 4451 - protein, 16 aa, synthetic construct
  VARIANT 3..12: note = any amino acid
KRXXXXXXXXXXKKKL

SEQ ID NO: 4452-7999 - skipped (3548 entries)

SEQ ID NO: 8000 - protein, 1367 aa, synthetic construct
DKKYSIGLDIGTNSVGWAVITDEYKVPSKKFKVLGNTDRHSIKKNLIGALLFDSGETAEATRLKRTARRRYTRRKNRICYLQEIFSNEMAKVDDSFFHRLEESFLVEEDKKHERHPIFGNIVDEVAYHEKYPTIYHLRKKLVDSTDKADLRLIYLALAHMIKFRGHFLIEGDLNPDNSDVDKLFIQLVQTYNQLFEENPINASGVDAKAILSARLSKSRRLENLIAQLPGEKKNGLFGNLIALSLGLTPNFKSNFDLAEDAKLQLSKDTYDDDLDNLLAQIGDQYADLFLAAKNLSDAILLSDILRVNTEITKAPLSASMIKRYDEHHQDLTLLKALVRQQLPEKYKEIFFDQSKNGYAGYIDGGASQEEFYKFIKPILEKMDGTEELLVKLNREDLLRKQRTFDNGSIPHQIHLGELHAILRRQEDFYPFLKDNREKIEKILTFRIPYYVGPLARGNSRFAWMTRKSEETITPWNFEEVVDKGASAQSFIERMTNFDKNLPNEKVLPKHSLLYEYFTVYNELTKVKYVTEGMRKPAFLSGEQKKAIVDLLFKTNRKVTVKQLKEDYFKKIECFDSVEISGVEDRFNASLGTYHDLLKIIKDKDFLDNEENEDILEDIVLTLTLFEDREMIEERLKTYAHLFDDKVMKQLKRRRYTGWGRLSRKLINGIRDKQSGKTILDFLKSDGFANRNFMQLIHDDSLTFKEDIQKAQVSGQGDSLHEHIANLAGSPAIKKGILQTVKVVDELVKVMGRHKPENIVIEMARENQTTQKGQKNSRERMKRIEEGIKELGSQILKEHPVENTQLQNEKLYLYYLQNGRDMYVDQELDINRLSDYDVDAIVPQSFLKDDSIDNKVLTRSDKNRGKSDNVPSEEVVKKMKNYWRQLLNAKLITQRKFDNLTKAERGGLSELDKAGFIKRQLVETRQITKHVAQILDSRMNTKYDENDKLIREVKVITLKSKLVSDFRKDFQFYKVREINNYHHAHDAYLNAVVGTALIKKYPKLESEFVYGDYKVYDVRKMIAKSEQEIGKATAKYFFYSNIMNFFKTEITLANGEIRKRPLIETNGETGEIVWDKGRDFATVRKVLSMPQVNIVKKTEVQTGGFSKESILPKRNSDKLIARKKDWDPKKYGGFDSPTVAYSVLVVAKVEKGKSKKLKSVKELLGITIMERSSFEKNPIDFLEAKGYKEVKKDLIIKLPKYSLFELENGRKRMLASAGELQKGNELALPSKYVNFLYLASHYEKLKGSPEDNEQKQLFVEQHKHYLDEIIEQISEFSKRVILADANLDKVLSAYNKHRDKPIREQAENIIHLFTLTNLGAPAAFKYFDTTIDRKRYTSTKEVLDATLIHQSITGLYETRIDLSQLGGD

SEQ ID NO: 8001 - protein, 503 aa, synthetic construct
TLNIEDEYRLHETSKEPDVSLGSTWLSDFPQAWAETGGMGLAVRQAPLIIPLKATSTPVSIKQYPMSQEARLGIKPHIQRLLDQGILVPCQSPWNTPLLPVKKPGTNDYRPVQDLREVNKRVEDIHPTVPNPYNLLSGLPPSHQWYTVLDLKDAFFCLRLHPTSQPLFAFEWRDPEMGISGQLTWTRLPQGFKNSPTLFNEALHRDLADFRIQHPDLILLQYVDDLLLAATSELDCQQGTRALLQTLGNLGYRASAKKAQICQKQVKYLGYLLKEGQRWLTEARKETVMGQPTPKTPRQLREFLGKAGFCRLFIPGFAEMAAPLYPLTKPGTLFNWGPDQQKAYQEIKQALLTAPALGLPDLTKPFELFVDEKQGYAKGVLTQKLGPWRRPVAYLSKKLDPVAAGWPPCLRMVAAIAVLTKDAGKLTMGQPLVILAPHAVEALVKQPPDRWLSNARMTHYQALLLDTDRVQFGPVVALNPATLLPLPEEGLQHNCLDNSRLIN

SEQ ID NO: 8002 - protein, 124 aa, synthetic construct
QVQLVESGGGLVQPGGSLTLSCTASGFTLDHYDIGWFRQAPGKEREGVSCINNSDDDTYYADSVKGRFTIFNNAKDTVYLQMNSLKPEDTAIYYCAEARGCKRGRYEYDFWGQGTQVTVSSKKK

SEQ ID NO: 8003 - protein, 11 aa, synthetic construct
PDRVRAVSHWS

SEQ ID NO: 8004 - protein, 19 aa, synthetic construct
ATNFSLLKQAGDVEENPGP

SEQ ID NO: 8005 - protein, 2290 aa, synthetic construct
MKRTADGSEFESPKKKRKVDKKYSIGLDIGTNSVGWAVITDEYKVPSKKFKVLGNTDRHSIKKNLIGALLFDSGETAEATRLKRTARRRYTRRKNRICYLQEIFSNEMAKVDDSFFHRLEESFLVEEDKKHERHPIFGNIVDEVAYHEKYPTIYHLRKKLVDSTDKADLRLIYLALAHMIKFRGHFLIEGDLNPDNSDVDKLFIQLVQTYNQLFEENPINASGVDAKAILSARLSKSRRLENLIAQLPGEKKNGLFGNLIALSLGLTPNFKSNFDLAEDAKLQLSKDTYDDDLDNLLAQIGDQYADLFLAAKNLSDAILLSDILRVNTEITKAPLSASMIKRYDEHHQDLTLLKALVRQQLPEKYKEIFFDQSKNGYAGYIDGGASQEEFYKFIKPILEKMDGTEELLVKLNREDLLRKQRTFDNGSIPHQIHLGELHAILRRQEDFYPFLKDNREKIEKILTFRIPYYVGPLARGNSRFAWMTRKSEETITPWNFEEVVDKGASAQSFIERMTNFDKNLPNEKVLPKHSLLYEYFTVYNELTKVKYVTEGMRKPAFLSGEQKKAIVDLLFKTNRKVTVKQLKEDYFKKIECFDSVEISGVEDRFNASLGTYHDLLKIIKDKDFLDNEENEDILEDIVLTLTLFEDREMIEERLKTYAHLFDDKVMKQLKRRRYTGWGRLSRKLINGIRDKQSGKTILDFLKSDGFANRNFMQLIHDDSLTFKEDIQKAQVSGQGDSLHEHIANLAGSPAIKKGILQTVKVVDELVKVMGRHKPENIVIEMARENQTTQKGQKNSRERMKRIEEGIKELGSQILKEHPVENTQLQNEKLYLYYLQNGRDMYVDQELDINRLSDYDVDAIVPQSFLKDDSIDNKVLTRSDKNRGKSDNVPSEEVVKKMKNYWRQLLNAKLITQRKFDNLTKAERGGLSELDKAGFIKRQLVETRQITKHVAQILDSRMNTKYDENDKLIREVKVITLKSKLVSDFRKDFQFYKVREINNYHHAHDAYLNAVVGTALIKKYPKLESEFVYGDYKVYDVRKMIAKSEQEIGKATAKYFFYSNIMNFFKTEITLANGEIRKRPLIETNGETGEIVWDKGRDFATVRKVLSMPQVNIVKKTEVQTGGFSKESILPKRNSDKLIARKKDWDPKKYGGFDSPTVAYSVLVVAKVEKGKSKKLKSVKELLGITIMERSSFEKNPIDFLEAKGYKEVKKDLIIKLPKYSLFELENGRKRMLASAGELQKGNELALPSKYVNFLYLASHYEKLKGSPEDNEQKQLFVEQHKHYLDEIIEQISEFSKRVILADANLDKVLSAYNKHRDKPIREQAENIIHLFTLTNLGAPAAFKYFDTTIDRKRYTSTKEVLDATLIHQSITGLYETRIDLSQLGGDSGGSSGGSSGSPDRVRAVSHWSSGGSKRTADGSEFESPKKKRKVATNFSLLKQAGDVEENPGPKRTADGSEFESPKKKRKVGGSQVQLVESGGGLVQPGGSLTLSCTASGFTLDHYDIGWFRQAPGKEREGVSCINNSDDDTYYADSVKGRFTIFNNAKDTVYLQMNSLKPEDTAIYYCAEARGCKRGRYEYDFWGQGTQVTVSSKKKNIEDEYRLHETSKEPDVSLGSTWLSDFPQAWAETGGMGLAVRQAPLIIPLKATSTPVSIKQYPMSQEARLGIKPHIQRLLDQGILVPCQSPWNTPLLPVKKPGTNDYRPVQDLREVNKRVEDIHPTVPNPYNLLSGLPPSHQWYTVLDLKDAFFCLRLHPTSQPLFAFEWRDPEMGISGQLTWTRLPQGFKNSPTLFNEALHRDLADFRIQHPDLILLQYVDDLLLAATSELDCQQGTRALLQTLGNLGYRASAKKAQICQKQVKYLGYLLKEGQRWLTEARKETVMGQPTPKTPRQLREFLGKAGFCRLFIPGFAEMAAPLYPLTKPGTLFNWGPDQQKAYQEIKQALLTAPALGLPDLTKPFELFVDEKQGYAKGVLTQKLGPWRRPVAYLSKKLDPVAAGWPPCLRMVAAIAVLTKDAGKLTMGQPLVILAPHAVEALVKQPPDRWLSNARMTHYQALLLDTDRVQFGPVVALNPATLLPLPEEGLQHNCLDILAEAHGTRPDLTDQPLPDADHTWYTDGSSLLQEGQRKAGAAVTTETEVIWAKALPAGTSAQRAELIALTQALKMAEGKKLNVYTDSRYAFATAHIHGEIYRRRGWLTSEGKEIKNKDEILALLKALFLPKRLSIIHCPGHQKGHSAEARGNRMADQAARKAAITETPDTSTLLIENSSPSGGSKRTADGSEFEPKKKRKV

SEQ ID NO: 8006 - protein, 2297 aa, synthetic construct
MKRTADGSEFESPKKKRKVDKKYSIGLDIGTNSVGWAVITDEYKVPSKKFKVLGNTDRHSIKKNLIGALLFDSGETAEATRLKRTARRRYTRRKNRICYLQEIFSNEMAKVDDSFFHRLEESFLVEEDKKHERHPIFGNIVDEVAYHEKYPTIYHLRKKLVDSTDKADLRLIYLALAHMIKFRGHFLIEGDLNPDNSDVDKLFIQLVQTYNQLFEENPINASGVDAKAILSARLSKSRRLENLIAQLPGEKKNGLFGNLIALSLGLTPNFKSNFDLAEDAKLQLSKDTYDDDLDNLLAQIGDQYADLFLAAKNLSDAILLSDILRVNTEITKAPLSASMIKRYDEHHQDLTLLKALVRQQLPEKYKEIFFDQSKNGYAGYIDGGASQEEFYKFIKPILEKMDGTEELLVKLNREDLLRKQRTFDNGSIPHQIHLGELHAILRRQEDFYPFLKDNREKIEKILTFRIPYYVGPLARGNSRFAWMTRKSEETITPWNFEEVVDKGASAQSFIERMTNFDKNLPNEKVLPKHSLLYEYFTVYNELTKVKYVTEGMRKPAFLSGEQKKAIVDLLFKTNRKVTVKQLKEDYFKKIECFDSVEISGVEDRFNASLGTYHDLLKIIKDKDFLDNEENEDILEDIVLTLTLFEDREMIEERLKTYAHLFDDKVMKQLKRRRYTGWGRLSRKLINGIRDKQSGKTILDFLKSDGFANRNFMQLIHDDSLTFKEDIQKAQVSGQGDSLHEHIANLAGSPAIKKGILQTVKVVDELVKVMGRHKPENIVIEMARENQTTQKGQKNSRERMKRIEEGIKELGSQILKEHPVENTQLQNEKLYLYYLQNGRDMYVDQELDINRLSDYDVDAIVPQSFLKDDSIDNKVLTRSDKNRGKSDNVPSEEVVKKMKNYWRQLLNAKLITQRKFDNLTKAERGGLSELDKAGFIKRQLVETRQITKHVAQILDSRMNTKYDENDKLIREVKVITLKSKLVSDFRKDFQFYKVREINNYHHAHDAYLNAVVGTALIKKYPKLESEFVYGDYKVYDVRKMIAKSEQEIGKATAKYFFYSNIMNFFKTEITLANGEIRKRPLIETNGETGEIVWDKGRDFATVRKVLSMPQVNIVKKTEVQTGGFSKESILPKRNSDKLIARKKDWDPKKYGGFDSPTVAYSVLVVAKVEKGKSKKLKSVKELLGITIMERSSFEKNPIDFLEAKGYKEVKKDLIIKLPKYSLFELENGRKRMLASAGELQKGNELALPSKYVNFLYLASHYEKLKGSPEDNEQKQLFVEQHKHYLDEIIEQISEFSKRVILADANLDKVLSAYNKHRDKPIREQAENIIHLFTLTNLGAPAAFKYFDTTIDRKRYTSTKEVLDATLIHQSITGLYETRIDLSQLGGDSGGSSGGSSGSQVQLVESGGGLVQPGGSLTLSCTASGFTLDHYDIGWFRQAPGKEREGVSCINNSDDDTYYADSVKGRFTIFNNAKDTVYLQMNSLKPEDTAIYYCAEARGCKRGRYEYDFWGQGTQVTVSSKKKKRTADGSEFESPKKKRKVATNFSLLKQAGDVEENPGPKRTADGSEFESPKKKRKVGGSPDRVRAVSHWSSGGSSGGSSGSNIEDEYRLHETSKEPDVSLGSTWLSDFPQAWAETGGMGLAVRQAPLIIPLKATSTPVSIKQYPMSQEARLGIKPHIQRLLDQGILVPCQSPWNTPLLPVKKPGTNDYRPVQDLREVNKRVEDIHPTVPNPYNLLSGLPPSHQWYTVLDLKDAFFCLRLHPTSQPLFAFEWRDPEMGISGQLTWTRLPQGFKNSPTLFNEALHRDLADFRIQHPDLILLQYVDDLLLAATSELDCQQGTRALLQTLGNLGYRASAKKAQICQKQVKYLGYLLKEGQRWLTEARKETVMGQPTPKTPRQLREFLGKAGFCRLFIPGFAEMAAPLYPLTKPGTLFNWGPDQQKAYQEIKQALLTAPALGLPDLTKPFELFVDEKQGYAKGVLTQKLGPWRRPVAYLSKKLDPVAAGWPPCLRMVAAIAVLTKDAGKLTMGQPLVILAPHAVEALVKQPPDRWLSNARMTHYQALLLDTDRVQFGPVVALNPATLLPLPEEGLQHNCLDILAEAHGTRPDLTDQPLPDADHTWYTDGSSLLQEGQRKAGAAVTTETEVIWAKALPAGTSAQRAELIALTQALKMAEGKKLNVYTDSRYAFATAHIHGEIYRRRGWLTSEGKEIKNKDEILALLKALFLPKRLSIIHCPGHQKGHSAEARGNRMADQAARKAAITETPDTSTLLIENSSPSGGSKRTADGSEFEPKKKRKV

SEQ ID NO: 8007 - protein, 2287 aa, synthetic construct
MKRTADGSEFESPKKKRKVDKKYSIGLDIGTNSVGWAVITDEYKVPSKKFKVLGNTDRHSIKKNLIGALLFDSGETAEATRLKRTARRRYTRRKNRICYLQEIFSNEMAKVDDSFFHRLEESFLVEEDKKHERHPIFGNIVDEVAYHEKYPTIYHLRKKLVDSTDKADLRLIYLALAHMIKFRGHFLIEGDLNPDNSDVDKLFIQLVQTYNQLFEENPINASGVDAKAILSARLSKSRRLENLIAQLPGEKKNGLFGNLIALSLGLTPNFKSNFDLAEDAKLQLSKDTYDDDLDNLLAQIGDQYADLFLAAKNLSDAILLSDILRVNTEITKAPLSASMIKRYDEHHQDLTLLKALVRQQLPEKYKEIFFDQSKNGYAGYIDGGASQEEFYKFIKPILEKMDGTEELLVKLNREDLLRKQRTFDNGSIPHQIHLGELHAILRRQEDFYPFLKDNREKIEKILTFRIPYYVGPLARGNSRFAWMTRKSEETITPWNFEEVVDKGASAQSFIERMTNFDKNLPNEKVLPKHSLLYEYFTVYNELTKVKYVTEGMRKPAFLSGEQKKAIVDLLFKTNRKVTVKQLKEDYFKKIECFDSVEISGVEDRFNASLGTYHDLLKIIKDKDFLDNEENEDILEDIVLTLTLFEDREMIEERLKTYAHLFDDKVMKQLKRRRYTGWGRLSRKLINGIRDKQSGKTILDFLKSDGFANRNFMQLIHDDSLTFKEDIQKAQVSGQGDSLHEHIANLAGSPAIKKGILQTVKVVDELVKVMGRHKPENIVIEMARENQTTQKGQKNSRERMKRIEEGIKELGSQILKEHPVENTQLQNEKLYLYYLQNGRDMYVDQELDINRLSDYDVDAIVPQSFLKDDSIDNKVLTRSDKNRGKSDNVPSEEVVKKMKNYWRQLLNAKLITQRKFDNLTKAERGGLSELDKAGFIKRQLVETRQITKHVAQILDSRMNTKYDENDKLIREVKVITLKSKLVSDFRKDFQFYKVREINNYHHAHDAYLNAVVGTALIKKYPKLESEFVYGDYKVYDVRKMIAKSEQEIGKATAKYFFYSNIMNFFKTEITLANGEIRKRPLIETNGETGEIVWDKGRDFATVRKVLSMPQVNIVKKTEVQTGGFSKESILPKRNSDKLIARKKDWDPKKYGGFDSPTVAYSVLVVAKVEKGKSKKLKSVKELLGITIMERSSFEKNPIDFLEAKGYKEVKKDLIIKLPKYSLFELENGRKRMLASAGELQKGNELALPSKYVNFLYLASHYEKLKGSPEDNEQKQLFVEQHKHYLDEIIEQISEFSKRVILADANLDKVLSAYNKHRDKPIREQAENIIHLFTLTNLGAPAAFKYFDTTIDRKRYTSTKEVLDATLIHQSITGLYETRIDLSQLGGDSGGSPDRRAAVSHWQSGGSSGGSSGSKRTADGSEFESPKKKRKVATNFSLLKQAGDVEENPGPKRTADGSEFESPKKKRKVQVQLVESGGGLVQPGGSLTLSCTASGFTLDHYDIGWFRQAPGKEREGVSCINNSDDDTYYADSVKGRFTIFNNAKDTVYLQMNSLKPEDTAIYYCAEARGCKRGRYEYDFWGQGTQVTVSSKKKNIEDEYRLHETSKEPDVSLGSTWLSDFPQAWAETGGMGLAVRQAPLIIPLKATSTPVSIKQYPMSQEARLGIKPHIQRLLDQGILVPCQSPWNTPLLPVKKPGTNDYRPVQDLREVNKRVEDIHPTVPNPYNLLSGLPPSHQWYTVLDLKDAFFCLRLHPTSQPLFAFEWRDPEMGISGQLTWTRLPQGFKNSPTLFNEALHRDLADFRIQHPDLILLQYVDDLLLAATSELDCQQGTRALLQTLGNLGYRASAKKAQICQKQVKYLGYLLKEGQRWLTEARKETVMGQPTPKTPRQLREFLGKAGFCRLFIPGFAEMAAPLYPLTKPGTLFNWGPDQQKAYQEIKQALLTAPALGLPDLTKPFELFVDEKQGYAKGVLTQKLGPWRRPVAYLSKKLDPVAAGWPPCLRMVAAIAVLTKDAGKLTMGQPLVILAPHAVEALVKQPPDRWLSNARMTHYQALLLDTDRVQFGPVVALNPATLLPLPEEGLQHNCLDILAEAHGTRPDLTDQPLPDADHTWYTDGSSLLQEGQRKAGAAVTTETEVIWAKALPAGTSAQRAELIALTQALKMAEGKKLNVYTDSRYAFATAHIHGEIYRRRGWLTSEGKEIKNKDEILALLKALFLPKRLSIIHCPGHQKGHSAEARGNRMADQAARKAAITETPDTSTLLIENSSPSGGSKRTADGSEFEPKKKRKV

SEQ ID NO: 8008 - protein, 2298 aa, synthetic construct
MKRTADGSEFESPKKKRKVDKKYSIGLDIGTNSVGWAVITDEYKVPSKKFKVLGNTDRHSIKKNLIGALLFDSGETAEATRLKRTARRRYTRRKNRICYLQEIFSNEMAKVDDSFFHRLEESFLVEEDKKHERHPIFGNIVDEVAYHEKYPTIYHLRKKLVDSTDKADLRLIYLALAHMIKFRGHFLIEGDLNPDNSDVDKLFIQLVQTYNQLFEENPINASGVDAKAILSARLSKSRRLENLIAQLPGEKKNGLFGNLIALSLGLTPNFKSNFDLAEDAKLQLSKDTYDDDLDNLLAQIGDQYADLFLAAKNLSDAILLSDILRVNTEITKAPLSASMIKRYDEHHQDLTLLKALVRQQLPEKYKEIFFDQSKNGYAGYIDGGASQEEFYKFIKPILEKMDGTEELLVKLNREDLLRKQRTFDNGSIPHQIHLGELHAILRRQEDFYPFLKDNREKIEKILTFRIPYYVGPLARGNSRFAWMTRKSEETITPWNFEEVVDKGASAQSFIERMTNFDKNLPNEKVLPKHSLLYEYFTVYNELTKVKYVTEGMRKPAFLSGEQKKAIVDLLFKTNRKVTVKQLKEDYFKKIECFDSVEISGVEDRFNASLGTYHDLLKIIKDKDFLDNEENEDILEDIVLTLTLFEDREMIEERLKTYAHLFDDKVMKQLKRRRYTGWGRLSRKLINGIRDKQSGKTILDFLKSDGFANRNFMQLIHDDSLTFKEDIQKAQVSGQGDSLHEHIANLAGSPAIKKGILQTVKVVDELVKVMGRHKPENIVIEMARENQTTQKGQKNSRERMKRIEEGIKELGSQILKEHPVENTQLQNEKLYLYYLQNGRDMYVDQELDINRLSDYDVDAIVPQSFLKDDSIDNKVLTRSDKNRGKSDNVPSEEVVKKMKNYWRQLLNAKLITQRKFDNLTKAERGGLSELDKAGFIKRQLVETRQITKHVAQILDSRMNTKYDENDKLIREVKVITLKSKLVSDFRKDFQFYKVREINNYHHAHDAYLNAVVGTALIKKYPKLESEFVYGDYKVYDVRKMIAKSEQEIGKATAKYFFYSNIMNFFKTEITLANGEIRKRPLIETNGETGEIVWDKGRDFATVRKVLSMPQVNIVKKTEVQTGGFSKESILPKRNSDKLIARKKDWDPKKYGGFDSPTVAYSVLVVAKVEKGKSKKLKSVKELLGITIMERSSFEKNPIDFLEAKGYKEVKKDLIIKLPKYSLFELENGRKRMLASAGELQKGNELALPSKYVNFLYLASHYEKLKGSPEDNEQKQLFVEQHKHYLDEIIEQISEFSKRVILADANLDKVLSAYNKHRDKPIREQAENIIHLFTLTNLGAPAAFKYFDTTIDRKRYTSTKEVLDATLIHQSITGLYETRIDLSQLGGDSGGSSGGSSGSQVQLVESGGGLVQPGGSLTLSCTASGFTLDHYDIGWFRQAPGKEREGVSCINNSDDDTYYADSVKGRFTIFNNAKDTVYLQMNSLKPEDTAIYYCAEARGCKRGRYEYDFWGQGTQVTVSSKKKKRTADGSEFESPKKKRKVATNFSLLKQAGDVEENPGPKRTADGSEFESPKKKRKVGGSPDRKAAVSHWQSSGGSSGGSSGSNIEDEYRLHETSKEPDVSLGSTWLSDFPQAWAETGGMGLAVRQAPLIIPLKATSTPVSIKQYPMSQEARLGIKPHIQRLLDQGILVPCQSPWNTPLLPVKKPGTNDYRPVQDLREVNKRVEDIHPTVPNPYNLLSGLPPSHQWYTVLDLKDAFFCLRLHPTSQPLFAFEWRDPEMGISGQLTWTRLPQGFKNSPTLFNEALHRDLADFRIQHPDLILLQYVDDLLLAATSELDCQQGTRALLQTLGNLGYRASAKKAQICQKQVKYLGYLLKEGQRWLTEARKETVMGQPTPKTPRQLREFLGKAGFCRLFIPGFAEMAAPLYPLTKPGTLFNWGPDQQKAYQEIKQALLTAPALGLPDLTKPFELFVDEKQGYAKGVLTQKLGPWRRPVAYLSKKLDPVAAGWPPCLRMVAAIAVLTKDAGKLTMGQPLVILAPHAVEALVKQPPDRWLSNARMTHYQALLLDTDRVQFGPVVALNPATLLPLPEEGLQHNCLDILAEAHGTRPDLTDQPLPDADHTWYTDGSSLLQEGQRKAGAAVTTETEVIWAKALPAGTSAQRAELIALTQALKMAEGKKLNVYTDSRYAFATAHIHGEIYRRRGWLTSEGKEIKNKDEILALLKALFLPKRLSIIHCPGHQKGHSAEARGNRMADQAARKAAITETPDTSTLLIENSSPSGGSKRTADGSEFEPKKKRKV

SEQ ID NO: 8009 - protein, 1430 aa, synthetic construct
MKRTADGSEFESPKKKRKVDKKYSIGLDIGTNSVGWAVITDEYKVPSKKFKVLGNTDRHSIKKNLIGALLFDSGETAEATRLKRTARRRYTRRKNRICYLQEIFSNEMAKVDDSFFHRLEESFLVEEDKKHERHPIFGNIVDEVAYHEKYPTIYHLRKKLVDSTDKADLRLIYLALAHMIKFRGHFLIEGDLNPDNSDVDKLFIQLVQTYNQLFEENPINASGVDAKAILSARLSKSRRLENLIAQLPGEKKNGLFGNLIALSLGLTPNFKSNFDLAEDAKLQLSKDTYDDDLDNLLAQIGDQYADLFLAAKNLSDAILLSDILRVNTEITKAPLSASMIKRYDEHHQDLTLLKALVRQQLPEKYKEIFFDQSKNGYAGYIDGGASQEEFYKFIKPILEKMDGTEELLVKLNREDLLRKQRTFDNGSIPHQIHLGELHAILRRQEDFYPFLKDNREKIEKILTFRIPYYVGPLARGNSRFAWMTRKSEETITPWNFEEVVDKGASAQSFIERMTNFDKNLPNEKVLPKHSLLYEYFTVYNELTKVKYVTEGMRKPAFLSGEQKKAIVDLLFKTNRKVTVKQLKEDYFKKIECFDSVEISGVEDRFNASLGTYHDLLKIIKDKDFLDNEENEDILEDIVLTLTLFEDREMIEERLKTYAHLFDDKVMKQLKRRRYTGWGRLSRKLINGIRDKQSGKTILDFLKSDGFANRNFMQLIHDDSLTFKEDIQKAQVSGQGDSLHEHIANLAGSPAIKKGILQTVKVVDELVKVMGRHKPENIVIEMARENQTTQKGQKNSRERMKRIEEGIKELGSQILKEHPVENTQLQNEKLYLYYLQNGRDMYVDQELDINRLSDYDVDAIVPQSFLKDDSIDNKVLTRSDKNRGKSDNVPSEEVVKKMKNYWRQLLNAKLITQRKFDNLTKAERGGLSELDKAGFIKRQLVETRQITKHVAQILDSRMNTKYDENDKLIREVKVITLKSKLVSDFRKDFQFYKVREINNYHHAHDAYLNAVVGTALIKKYPKLESEFVYGDYKVYDVRKMIAKSEQEIGKATAKYFFYSNIMNFFKTEITLANGEIRKRPLIETNGETGEIVWDKGRDFATVRKVLSMPQVNIVKKTEVQTGGFSKESILPKRNSDKLIARKKDWDPKKYGGFDSPTVAYSVLVVAKVEKGKSKKLKSVKELLGITIMERSSFEKNPIDFLEAKGYKEVKKDLIIKLPKYSLFELENGRKRMLASAGELQKGNELALPSKYVNFLYLASHYEKLKGSPEDNEQKQLFVEQHKHYLDEIIEQISEFSKRVILADANLDKVLSAYNKHRDKPIREQAENIIHLFTLTNLGAPAAFKYFDTTIDRKRYTSTKEVLDATLIHQSITGLYETRIDLSQLGGDSGGSPDRRAAVSHWQSGGSSGGSSGSKRTADGSEFESPKKKRKV

SEQ ID NO: 8010 - protein, 739 aa, synthetic construct
KRTADGSEFESPKKKRKVGGSPDRVRAVSHWSSGGSSGGSSGSNIEDEYRLHETSKEPDVSLGSTWLSDFPQAWAETGGMGLAVRQAPLIIPLKATSTPVSIKQYPMSQEARLGIKPHIQRLLDQGILVPCQSPWNTPLLPVKKPGTNDYRPVQDLREVNKRVEDIHPTVPNPYNLLSGLPPSHQWYTVLDLKDAFFCLRLHPTSQPLFAFEWRDPEMGISGQLTWTRLPQGFKNSPTLFNEALHRDLADFRIQHPDLILLQYVDDLLLAATSELDCQQGTRALLQTLGNLGYRASAKKAQICQKQVKYLGYLLKEGQRWLTEARKETVMGQPTPKTPRQLREFLGKAGFCRLFIPGFAEMAAPLYPLTKPGTLFNWGPDQQKAYQEIKQALLTAPALGLPDLTKPFELFVDEKQGYAKGVLTQKLGPWRRPVAYLSKKLDPVAAGWPPCLRMVAAIAVLTKDAGKLTMGQPLVILAPHAVEALVKQPPDRWLSNARMTHYQALLLDTDRVQFGPVVALNPATLLPLPEEGLQHNCLDILAEAHGTRPDLTDQPLPDADHTWYTDGSSLLQEGQRKAGAAVTTETEVIWAKALPAGTSAQRAELIALTQALKMAEGKKLNVYTDSRYAFATAHIHGEIYRRRGWLTSEGKEIKNKDEILALLKALFLPKRLSIIHCPGHQKGHSAEARGNRMADQAARKAAITETPDTSTLLIENSSPSGGSKRTADGSEFEPKKKRKV

SEQ ID NO: 8011 - protein, 740 aa, synthetic construct
KRTADGSEFESPKKKRKVGGSPDRKAAVSHWQSSGGSSGGSSGSNIEDEYRLHETSKEPDVSLGSTWLSDFPQAWAETGGMGLAVRQAPLIIPLKATSTPVSIKQYPMSQEARLGIKPHIQRLLDQGILVPCQSPWNTPLLPVKKPGTNDYRPVQDLREVNKRVEDIHPTVPNPYNLLSGLPPSHQWYTVLDLKDAFFCLRLHPTSQPLFAFEWRDPEMGISGQLTWTRLPQGFKNSPTLFNEALHRDLADFRIQHPDLILLQYVDDLLLAATSELDCQQGTRALLQTLGNLGYRASAKKAQICQKQVKYLGYLLKEGQRWLTEARKETVMGQPTPKTPRQLREFLGKAGFCRLFIPGFAEMAAPLYPLTKPGTLFNWGPDQQKAYQEIKQALLTAPALGLPDLTKPFELFVDEKQGYAKGVLTQKLGPWRRPVAYLSKKLDPVAAGWPPCLRMVAAIAVLTKDAGKLTMGQPLVILAPHAVEALVKQPPDRWLSNARMTHYQALLLDTDRVQFGPVVALNPATLLPLPEEGLQHNCLDILAEAHGTRPDLTDQPLPDADHTWYTDGSSLLQEGQRKAGAAVTTETEVIWAKALPAGTSAQRAELIALTQALKMAEGKKLNVYTDSRYAFATAHIHGEIYRRRGWLTSEGKEIKNKDEILALLKALFLPKRLSIIHCPGHQKGHSAEARGNRMADQAARKAAITETPDTSTLLIENSSPSGGSKRTADGSEFEPKKKRKV

SEQ ID NO: 8012 - protein, 841 aa, synthetic construct
KRTADGSEFESPKKKRKVGGSQVQLVESGGGLVQPGGSLTLSCTASGFTLDHYDIGWFRQAPGKEREGVSCINNSDDDTYYADSVKGRFTIFNNAKDTVYLQMNSLKPEDTAIYYCAEARGCKRGRYEYDFWGQGTQVTVSSKKKNIEDEYRLHETSKEPDVSLGSTWLSDFPQAWAETGGMGLAVRQAPLIIPLKATSTPVSIKQYPMSQEARLGIKPHIQRLLDQGILVPCQSPWNTPLLPVKKPGTNDYRPVQDLREVNKRVEDIHPTVPNPYNLLSGLPPSHQWYTVLDLKDAFFCLRLHPTSQPLFAFEWRDPEMGISGQLTWTRLPQGFKNSPTLFNEALHRDLADFRIQHPDLILLQYVDDLLLAATSELDCQQGTRALLQTLGNLGYRASAKKAQICQKQVKYLGYLLKEGQRWLTEARKETVMGQPTPKTPRQLREFLGKAGFCRLFIPGFAEMAAPLYPLTKPGTLFNWGPDQQKAYQEIKQALLTAPALGLPDLTKPFELFVDEKQGYAKGVLTQKLGPWRRPVAYLSKKLDPVAAGWPPCLRMVAAIAVLTKDAGKLTMGQPLVILAPHAVEALVKQPPDRWLSNARMTHYQALLLDTDRVQFGPVVALNPATLLPLPEEGLQHNCLDILAEAHGTRPDLTDQPLPDADHTWYTDGSSLLQEGQRKAGAAVTTETEVIWAKALPAGTSAQRAELIALTQALKMAEGKKLNVYTDSRYAFATAHIHGEIYRRRGWLTSEGKEIKNKDEILALLKALFLPKRLSIIHCPGHQKGHSAEARGNRMADQAARKAAITETPDTSTLLIENSSPSGGSKRTADGSEFEPKKKRKV

SEQ ID NO: 8013 - protein, 1430 aa, synthetic construct
MKRTADGSEFESPKKKRKVDKKYSIGLDIGTNSVGWAVITDEYKVPSKKFKVLGNTDRHSIKKNLIGALLFDSGETAEATRLKRTARRRYTRRKNRICYLQEIFSNEMAKVDDSFFHRLEESFLVEEDKKHERHPIFGNIVDEVAYHEKYPTIYHLRKKLVDSTDKADLRLIYLALAHMIKFRGHFLIEGDLNPDNSDVDKLFIQLVQTYNQLFEENPINASGVDAKAILSARLSKSRRLENLIAQLPGEKKNGLFGNLIALSLGLTPNFKSNFDLAEDAKLQLSKDTYDDDLDNLLAQIGDQYADLFLAAKNLSDAILLSDILRVNTEITKAPLSASMIKRYDEHHQDLTLLKALVRQQLPEKYKEIFFDQSKNGYAGYIDGGASQEEFYKFIKPILEKMDGTEELLVKLNREDLLRKQRTFDNGSIPHQIHLGELHAILRRQEDFYPFLKDNREKIEKILTFRIPYYVGPLARGNSRFAWMTRKSEETITPWNFEEVVDKGASAQSFIERMTNFDKNLPNEKVLPKHSLLYEYFTVYNELTKVKYVTEGMRKPAFLSGEQKKAIVDLLFKTNRKVTVKQLKEDYFKKIECFDSVEISGVEDRFNASLGTYHDLLKIIKDKDFLDNEENEDILEDIVLTLTLFEDREMIEERLKTYAHLFDDKVMKQLKRRRYTGWGRLSRKLINGIRDKQSGKTILDFLKSDGFANRNFMQLIHDDSLTFKEDIQKAQVSGQGDSLHEHIANLAGSPAIKKGILQTVKVVDELVKVMGRHKPENIVIEMARENQTTQKGQKNSRERMKRIEEGIKELGSQILKEHPVENTQLQNEKLYLYYLQNGRDMYVDQELDINRLSDYDVDAIVPQSFLKDDSIDNKVLTRSDKNRGKSDNVPSEEVVKKMKNYWRQLLNAKLITQRKFDNLTKAERGGLSELDKAGFIKRQLVETRQITKHVAQILDSRMNTKYDENDKLIREVKVITLKSKLVSDFRKDFQFYKVREINNYHHAHDAYLNAVVGTALIKKYPKLESEFVYGDYKVYDVRKMIAKSEQEIGKATAKYFFYSNIMNFFKTEITLANGEIRKRPLIETNGETGEIVWDKGRDFATVRKVLSMPQVNIVKKTEVQTGGFSKESILPKRNSDKLIARKKDWDPKKYGGFDSPTVAYSVLVVAKVEKGKSKKLKSVKELLGITIMERSSFEKNPIDFLEAKGYKEVKKDLIIKLPKYSLFELENGRKRMLASAGELQKGNELALPSKYVNFLYLASHYEKLKGSPEDNEQKQLFVEQHKHYLDEIIEQISEFSKRVILADANLDKVLSAYNKHRDKPIREQAENIIHLFTLTNLGAPAAFKYFDTTIDRKRYTSTKEVLDATLIHQSITGLYETRIDLSQLGGDSGGSSGGSSGSPDRVRAVSHWSSGGSKRTADGSEFESPKKKRKV

SEQ ID NO: 8014 - protein, 20 aa, synthetic construct
QCTNYALLKLAGDVESNPGP

SEQ ID NO: 8015 - protein, 18 aa, synthetic construct
EGRGSLLTCGDVEENPGP

SEQ ID NO: 8016 - protein, 22 aa, synthetic construct
VKQTLNFDLLKLAGDVESNPGP

SEQ ID NO: 8017 - protein, 30 aa, synthetic construct
RTAFDFQQDVFRSNYDLLKLSGDIESNPGP

SEQ ID NO: 8018 - protein, 30 aa, synthetic construct
PSIGNVARTLTRAKIEDELIRAGIESNPGP

SEQ ID NO: 8019 - protein, 11 aa, synthetic construct
PDRKAAVSHWQ

SEQ ID NO: 8020 - protein, 11 aa, synthetic construct
PDRRAAVSHWQ

SEQ ID NO: 8021 - protein, 761 aa, synthetic construct
HAQLLRSIKARFPDCTRKSVVRSGDESPLRTPGKFEKAWRAKVTTRRLTKLIHNGCIILFGVRYHPGKGTSTSWSPFRIYWRPIATGVSRSNQDTFTSVDIMQRAKVTYFGGCGNMRYPTARKSHGYGASIIGFTRREAGLRLYTQNSAISDSSMTSCGIISKHRKFNKDKNFVNKRLINIIGDVQTLIVAYEFVKSKPGQMVKGSIDSTLDDIDLAWIKSISKVIKAGKFKFIPSRRIYVSKTGCKERRPIMTGFPRDKLVQKAIQLVLEPIYENVFLENSHGFRPARGCHTALKSIKQGFHGVTWVIESDIASCFSSVNHEVLLSIIKERIKCVKTLALIRNLLESGYVDLGAFCKSKLGIPQGSSLSPLLCNIYLHKFDTFMYELKQRFVYTSSKDPRINPAYKRLQRQIQNTPGLVEKSKFIQELRKTPSKDLFDPKYRRLFYIRYADDFSIGITGQKKDAVEILDQAKIFLSEELKMDLKESKIRVVHLKKQSIFFLGTTIYGISCVEKPMRTVKHSNWKTSIKIRVTPRVGLHAPMKVLLEKLLQNKFVKRDKEGIFKPTALGKLVNFDHADIIGYYNSVARGIMNYYSFVDNYSRLGSIVKYYLLHSCALTLALKYKLRFKSKAFKRFGGKLKCPDTKKEFFIPKNFFRTEKFSINPPDTEQVISKRWNNKLTKSSLFKACVICGTTPAEMYHVCKTRDLRNKYKTKKLDFFKFQMASFNQKQVPLCQFHHKSLHQGKLSEADKVAFREGITNL

SEQ ID NO: 8022 - protein, 632 aa, synthetic construct
LPDTIERAVRSLPTVIRSGRKVNGLYRLLKSPLLWEHAYQRIAPNKGAMTPGVDGQTFDGFSPDKVRSIIERLANGTYRPQPARRVYIPKANGQKRPLGVPTTEDKLVQEVVRTILEQIYEPLFSRHSHGFRPKRSCHTALESIRAIWTGVKWLIDVDVVGFFDNIDHDVLVSLLEKRIADRRFVRLIRGLLKAGYVEDWVFHKTYSGTPQGGVVSPMLANIYLHELDMFMQAKMAGFDKGKQRSPSPDARRIRNRLSYVRRTVDQLRAKGRGDDPRVTSFLEEIGRLKAERLAVPASDAFDPNYRRLRYCRYADDFIIGVTGSKSEARQIMEEVRTYLSDHLKLAVSAEKSGIHKASDGARFLGYEVRTMTNPNPHKAIFDGRPAVRRGLADRMKLLVPRDRVVRFVNSKEWGDYDSFRPVGRAALRFASDVEIVLAYNAEWRGFANYYAIADDVKRKLNKAGYFALLSCVKTIAGKHRTSARRVFAKLRRGTDFYISYEVGDTTRTIKLWQLKDLQRHTRTWGGIDIPSSAKFVFSRTELVERLNARECERCGSNDQPCEVHHVRRIGELQHAGFSRHMAAARQRKRMVLCSRCHNDVHAGQPTDRQRRTARSRGEPNALKGARSVRRGA

SEQ ID NO: 8023 - protein, 752 aa, synthetic construct
ASKETGMFSLAGELASLVEESSSHVDDDSKPRSRMELKRSLELRLKKRVKEQCINGKFSDLLKKVIARPETLRDAYDCIRLNSNVSITERNGSVAFDSIAEELSSGVFDVASNTFSIVARDKTKEVLVLPSVALKVVQEAIRIVLEVVFSPHFSKISHSCRSGRGRASALKYINNNISRSDWCFTLSLNKKLDVSVFENLLSVMEEKVEDSSLSILLRSMFEARVLNLEFGGFPKGHGLPQEGVLSRVLMNIYLDRFDHEFYRISMRHEALGLDSKTDEDSPGSKLRSWFRRQAGEQGLKSTTEQDVALRVYCCRFMDEIYFSVSGPKKVASDIRSEAIGFLRNSLHLDITDETDPSPCEATSGLRVLGTLVRKNVRESPTVKAVHKLKEKVRLFALQKEEAWTLGTVRIGKKWLGHGLKKVKESEIKGLADSNSTLSQISCHRKAGMETDHWYKILLRIWMEDVLRTSADRSEEFVLSKHVVEPTVPQELRDAFYKFQNAAAAYVSSETANLEALLPCPQSHDRPVFFGDVVAPTNAIGRRLYRYGLITAKGYARSNSMLILLDTAQIIDWYSGLVRRWVIWYEGCSNFDEIKALIDNQIRMSCIRTLAAKYRIHENEIEKRLDLELSTIPSAEDIEQEIQHEKLDSPAFDRDEHLTYGLSNSGLCLLSLARLVSESRPCNCFVIGCSMAAPAVYTLHAMERQKFPGWKTGFSVCIPSSLNGRRIGLCKQHLKDLYIGQISLQAVDFGAWR

SEQ ID NO: 8024 - protein, 547 aa, synthetic construct
NTSERASAHVSYTNWKAVQMYVTKLRQRIYRAEQLQQQRKVRKLQRLLMRSEANLLLSIRRVTQQNKGKRTAGVDEHTALSRRERNLLYEQLKKLNTLQHRPKPAKRIYIVKKNGKLRPLGIPTIKDRVYQNIVRNALEPQWEARFEAISYGFRPKRSTHDAIRSIFNRINGGTKKKWIVEGDFQGCFDHLNHEWILKQTSYFPGRKLLKRWLKMGYMEQSFFAETQEGTPQGGIISPLLANIALHGMEETLGITYKKNYKANDSYIMNPACKFTLIRYADDFVVLTETKEQALSVYMRLRPYLKDRGLELSPEKTKVTHIEEGFEFLGFLIRQYQTEQGNKLFIKPSKGSRQKAKKKIGDTLRVMRGQPIGEIIRVLNPIIRGYGQYWKHVVSKKIFGTMDSYIYWRIGKHLRQLHPKKSWKWIYARYYRHPHHGGNAWTPTCPKTNIQLLHMSWIKIERHNMVKFKNSPDDPTLKEYWEKRDRKVFDTENTMDRMKLARKQGYRCAICKTPLQNGEKVVVKDMPVPQHLILSNLNLKLVHLPCLY

SEQ ID NO: 8025 - protein, 469 aa, synthetic construct
DSKDMQRLQTTQQRGYPLDREMEFQKTTEVHSISSASRDGRNEVQRYTSKMLEMIVERGNMRAAYKRVVANKGSHGVDGMEVDELLPYLKENWPTIKQQLLEGKYKPQPVRRVEIPKPDGGVRLLGIPTALDRLIQQAIAQILNRVYNHTFSDSSYGFRPGRSAKDAIKAAEAYINEGYTWVVDMDLEKFFDRVNHDIIMSKLEKRIGDKRVLKLIRRYLESGVMINGVKVSTEEGTPQGGPLSPLLANIMLDELDKELEKRGHKFCRYADDCNIYVKSRSAGNRVMKSIKKFIESKLKLKVNEAKSAVDRPWRRKFLGFSFYTKENEVRIRIHEKSIKRFKEKVREITNRNKGISMENRIKRLNQITTGWVNYFGLADAKSIMKTLDEWIRRRLRACIWKQWKKIKTKHDNLVKLGVEEQKAWEYANTRKGYWRISNSPILNKTLTNKYFESIGYKSLSQRYLIVHNS

SEQ ID NO: 8026 - protein, 419 aa, synthetic construct
QETKPFGISKNVVMMAFERVKANKGTYGMDEQSIEMYEMDLKNNLYKLWNRMSSGSYFPKPVKAVAIPKKNGGTRTLGIPTVEDRVAQMVAKLYFEPNVERLFYEDSYGYRPNKSAIQAIEATRKRCWRKDWVLEFDIKGLFDNIRHDYLIEMVKRHTNQEWVTLYVQRWLITPFQMEDGTLIERTAGTPQGGVISPVLANLFLHYTFDDFMVKEFSSIPWARYADDGIAHCTSLKQAKYLQRRLEERFKLFGLELNLEKTKIAYCKDDDRQLSYPNTSFDFLGYTFRPRHAKNKHGKFFTNFSPAIADKAKKAIRKEVRSWRLQLKADKTLQDISNMFNKKIQGWINYYGHFYKSEMYSVLRYINSSLIKWVRRKYKKRKHRRKAEYWLGTIAQRERKLFAHWKYGILPATNNGSRMS

SEQ ID NO: 8027 - protein, 426 aa, synthetic construct
KKEKIDGWYKSGRNYLHFDEKVSFEKASRIVKNPRKVASWNFFPFLQTTVKTSKITRNDEGEIVPKNKSRPISYAAHTDSHIYSYYATLLQPIYEKFIEKHGLGTNITGFRKLDGECNIDFAHRAFNAIRSMTPCIALSFDVKSFFDEIDHSILKQAWCTILEKTLLPEDHFAIFKSLTTYSYVDRDDAFNAFGITKSSKKNGIRRICNPLEFRSILRPAGLIKRNKNSYGIPQGSPISGLLSNIYLFEFDKAISYFASDTKSHYYRYCDDIIIICNEEHEELFKNLVSDELKKLNLRTNEKNVIRKFFMGCDGPECDKPIQYLGFVFDGKRAVIRSASHSRFLKRMRKAVSLAKQTKRKRDKIRTSKGLETTSLHKKKLYTKYSYLGNRNYISYAHRAAKIMDEDAIKKQVKPLWKRLRQEIESD

SEQ ID NO: 8028 - protein, 315 aa, synthetic construct
SMKEFALNLSALYSAFDAVKENHGCAGADGVTIERYEGNLDLNLRIMRKELTEQTYFPLPLLRILVDKGNGEARALCIPSVRDRIVQAAVLQLIEPVLEKEFEECSFAYRKGRSVKQAVYKVREYYEQGYQWVVDADIDAFFDSVDYSLLLLKFKCYIHDPCIQNLVGLWLKGEVWDGKTVTTLKKGIPQGSPISPILANLYLDEFDEELTRNGYKLVRFSDDFIILCKNSGMAKESLKLTKKILEKLLLELDEEQVINFDQGFKFLGVIFVKSMIMVPFDRPKKERKVLFFPKPLDLEVYFKQRKQGKIWQTST

SEQ ID NO: 8029 - protein, 382 aa, synthetic construct
KKYSLTPAMLEVCKEYNFFSDVSGFMPLTSENIKEIKIGKKFAYSHQDNNKPTHQKLSKIIFENFLSNIPLNQSAIAYVKKKSYFDFIEPHRNNYFFLRIDLKDFFHSISEDLLKRTLSDYFSSESLSETIKQSNIDAIFTFLTVNLKSDSSNVKFLDKKILPIGFPLSPNLANIVFRKTDLLLEKLCDMHGVTYTRYADDMLFSSRGIMEKNLLFRKNNNYKKPYIHSDNFLSEIKYLVSIDGFFINHNKTIKSVNTLSLNGYTISGTNFPDIEGKIRLSNKKTKIIEKVIHEININPDDKVTFEKCFKKEFPKPKYEKNRDNFINNLCTIKINQKLLGYRSYLISIIKFNNKFNCISESSEDKYNTLLSKIENVIKKRIK

SEQ ID NO: 8030 - protein, 342 aa, synthetic construct
EHTYYPHHPINSLKALNRALGIDEDEIFHALSNISYKEVPIKKKDGAIRVTYDATSALKVVQKKVTSNIFHRVNFPHYIHGCIRDTKTPRNIYTNAYPHAGCKQVILCDIKDFFPSIKAKTVFFIFRHCLGFSPNVSQRLTDLCTYNGTLPQGASTSSYIANLAFWDVEPLLVKKLESLGLTYTRFADDITISAKKSISKSLKTQVLHEVRRTIRKRGCSLKKNKTIVLKRSQVIIGKDKETQETTRNPITVTSLSIHHSSVTISKVERRKVRAFVDKLSKTEFNRVSYHEWCRRYSSAMGRVSRLISCGHKEGEPLKQRLKALKDEHKKFHQRSSNVSGRK

SEQ ID NO: 8031 - protein, 308 aa, synthetic construct
HTVHGNFFYKLSNKKRLAKYLRVSLKELLTLQDDSNYKVWSEEGENGKLREIQEPVYKLKSVHSKIQKSLASIVAPEFLFSGVKGKSNISNASYHKDGNYIVTADIQSFYINCNKEHIFRFFKYTLRTSDDIARILTELCCYKTFLPTGSPVSQILAYHSYARIFNRIDAFSKANDITFSLYVDDITLSSEKSIHRYILKTISKLLKSVNLSLKKEKTKFYNKNSYKIVTGCAISPDHILLRPNKIMRKIDNKLCKHEKDLSKLTPKEIESVLGQVIYLRSITPNSYPQLFKSLSLMKTEEKIKQRPL

SEQ ID NO: 8032 - protein, 301 aa, synthetic construct
DKKAIYIERFLVYAPRKYRVYKIPKRKHGSRVIAQPTAELKKLQRAFINRSKIPVHECAMAYKDGVSIKDNAQLHSTNTFFLSMDFENFFNSITPDLLWGVFNKFGKVISPNEKLWLSKLLFWCPSKKNSNKLILSVGAPSSPKVSNFCMYFFDEYISTYCQDRNITYSRYADDLSFSTNEKDILFQIPGVVKETLLKLFGRDITINNSKTVFSSKAHNRHVTGITITNEGELSLGREKKRYIKHLIFRFKNGLLDVSDVSYLRGILSFAFYIEPAFKTSMVKKYTKATIDSIFNGVDDGK

SEQ ID NO: 8033 - protein, 429 aa, synthetic construct
KILKIPKKNGKYRTIYAPDAEEKRALRGIVGILNQKCQHVCDPAAVHGFMPLKSPVTNALAHVGRKYTVSFDLEDFFDTVTPEKASKCLTKEQKELVFVDGAARQGLPTSPAVANLAATDMDRAILKWIEKSGKSVVYTRYADDLAFSFDDPELIPVIQKKVPEIIRRSGFRVNTDKTTVQAAVAGRRIICGVAVDDEGVHPTREVKRRLRAAKHQGNELEAAGLEEWCKLKVPSGKRQKARETTEGLDELRKHWKLRKIDMAKAVSRKVIPEKDLGDNCYITNDPAYFMGMSTFTTGWKSCMRMDGGEYRKGVMAWLALPGTSVAVFLSDRTMNIAGVERRRMRARCLVHKLENGQLVYDRLYGNPDDTPVLVKKLEEAGIRPIREFAGKGIYVEGDVPASMAMPYCDNLWEEKINIKSGKRVVRFYV

SEQ ID NO: 8034 - protein, 297 aa, synthetic construct
SITDLALAIGVSPRLITSFIHAPGNHYRHFNIGKRGGGERVISSPRTFLKVVQYWILDYLLHPLPCHPNCHSYQKGKSILSNSLPHVGKKYVANIDILNFFPSITERMVFDFLKKNNFGEQLSKSLSRIVTLNNGLPQGAPTSPVISNSFLNKFDEIISEKSLLLDVSFTRYADDITISGDRKENIISLIEISEHYLNSIGLKLNNKKTRIASKGGQQRVTGIVVNKTAQPPRKFRKNIRSMFHHAGMKPELFVDKINVLRGYVSYLQSFPNLYDGNEIKKYKKICATIQANFVQKQ

SEQ ID NO: 8035 - protein, 348 aa, synthetic construct
EWIEYREQFITTAKKASKNSGYIKKNLKYAEKLYNQKLPIIYNASHFSKLVGYSLQYLYAASNDSSKFYREFEIKKKNGGSRKISEPLPSLKEIQKWILENILNKIQKEKVSKYAKAYQKKISIKENVKFHRGQKKVLSLDITNFFLNIKIDKIYEVFYNLGYSKSLSTLFSNLCTLNYSLPQGAPTSPILSNIVMLNFDNEIEKIVLEKRIRYTRYADDMTFSGDFLEKEIIKYVKENLNKIGLKINNKKTRVRKNWQQQMVTGIIVNEKIQISRKKRDELRQTMYYIEKYGIDSFLKYKGIKNKVYYLSHLKGILEYAYFINKNDKKLFNYIEYLKNNFFKEKSSI

SEQ ID NO: 8036 - protein, 256 aa, synthetic construct
TIEVQRWEDKFEIKPGVWVYVPSVEARKVGGKILQAVRNKWIPPLYFYHLRTGGHLKAARLHLKSDFFAVVDIKQFFQSTSRSRITRDLKSYFTYSQAREISTFSTVRNLSHSPHKHVLPFGFVQSPILATLCLDKSYFGSLLRRLNKHHDLKLSVFMDDVIISSNNLAQLQAAYDEALVAMRKSGYQANMSKTQAPSSKISVFNLTLSKGVMKVTSQKMSDFLIDFYSSNYEPHRIGVKNYVEAVNPGQAKLFKL

SEQ ID NO: 8037 - protein, 380 aa, synthetic construct
NRWSSRAFKKHNSDKPAAVVETAALYGRKIQTSCPELPVIFTLNHLALKSGVPYNNLRSFVDRTIERPYRSFTLRKNGLGSNPRKFRVIKVPQQDLKKAQQFINQNILSKMEPHECSVAFSPGSKIYDAASEHCNARWLLKFDIVSFFESITEKSVYRVFRRYNYPALLSFEMARICTALKARPPINWGGAPPNIRYRTIPGYSNKNLGTLPQGAPTSPMLANLVSYNLDRRLKLIADAYNCHYSRYADDITFSTDSSLSRGEVSRIIAMINSTLREYGHTMNKAKTTIAPPGARKFYLGMNIHGDSPQLRKSFKRKLKQHLFFCEKNSVGPEKHSKHLGFVSVIGFKNHLRGLINYANQVDTVFGENCMKRFQSIDWPL

SEQ ID NO: 8038 - protein, 337 aa, synthetic construct
EKIENEIVNKTYLAINSLEELRNMIGIKSDYFYKCLYVNDHFYNVIKIPKRKKDEYRELMIPNMALKNIQRWILDNVLYRRQVHKCATGFVPRKSIVNNAIPHVGQKYILKMDIENFFPSITFKQVRKIFSEMGYKFELATALANLCTVNNQLPQGAPTSPYIANIIFYNIDKRIFSYCQKNNLRYTRYADDITISGSNKVSFSKEIIREIVNQYNFRINESKTIMFKPGDRKKVTGIIVNEKISVPKTLIREVRKQIYFVNKFGLEEHLIRNNYSLDYEQQFIMSIYGKISFIKMIDFKKGVSLQKKFNEVLGNIESSNMYRDNIDFDDIELHWIN

SEQ ID NO: 8039 - protein, 484 aa, synthetic construct
TARLDPFVPAASPQAVPTPELTAPSSDAAAKREARRLAHEALLVRAKAIDEAGGADDWVQAQLVSKGLAVEDLDFSSASEKDKKAWKEKKKAEATERRALKRQAHEAWKATHVGHLGAGVHWAEDRLADAFDVPHREERARANGLTELDSAEALAKALGLSVSKLRWFAFHREVDTATHYVSWTIPKRDGSKRTITSPKPELKAAQRWVLSNVVERLPVHGAAHGFVAGRSILTNALAHQGADVVVKVDLKDFFPSVTWRRVKGLLRKGGLREGTSTLLSLLSTEAPREAVQFRGKLLHVAKGPRALPQGAPTSPGITNALCLKLDKRLSALAKRLGFTYTRYADDLTFSWTKAKQPKPRRTQRPPVAVLLSRVQEVVEAEGFRVHPDKTRVARKGTRQRVTGLVVNAAGKDAPAARVPRDVVRQLRAAIHNRKKGKPGREGESLEQLKGMAAFIHMTDPAKGRAFLAQLTELESTASAAPQAE

SEQ ID NO: 8040 - protein, 360 aa, synthetic construct
YSQNLTTIPLATESNLERLETDNLALLRSHGLAEYNTAEEIAFAMVISLEKLHFLTTSTSLTRHYLPFKISKKTGGKRIISAPKPELKAAQRWILENILEKLEVHNAAHGFCKNRSIVTNAKPHVGANVIVNIDLQNFFQSISYKRIKELFSGFGYSESTATIFGLICTTAEIAINGQINHTASENRHLPQGSPASPAISNLVCRNLDIRLAAIAENLGFCYTRYADDLTFSTSEDASSKISNLIKNTKFIIHGENFTVNDNKTKISSKSVQQEVTGVIVNTQLNISKKTLKAFRATLYQIEQEGLSGKSWGKSTNLIAAITGFANYVAMINPDKGAEFKSSVERIKQKYGGSQTDEVRF

SEQ ID NO: 8041 - protein, 382 aa, synthetic construct
AGMPGFVSAWRSEQPPRVVRVLTRPPFQRPPPPWLHDVALPQLPTLGDLAAWLDIEPGDLGWFADRWRVPTRGAATPLHHYAYKAIEKRDGRCRIIEIPKPRLRALQRKVLSGLLDRIPAHESVHGFRHGRNIVTFAAPHVGKAVVMRFDLTDFFASVHAGRVYSAFYALGYPQAVARALTALCTNRIPSGRLLAPDVRERIDWRERQRYRNRHLPQGAPTSPALANLCAFRLDLRLAGLARSVGATYTRYADDLAFSGDEELARMADRLCIRVAAIALEEGFGVNLRKTRVMRRSARQHLAGVVVNSHANVARPEFDALKAVLTNCVRHGWRSQNRDDLADFRAHLAGRVAHVAMVNAVRGARLRAVFERIEWEEEKPLDA

SEQ ID NO: 8042 - protein, 369 aa, synthetic construct
ELLLGIVIVVTCWMVVRIIRSSKNQEGYKRWRAGNYASENPYAKEKASGPLSQGLFSKRVRTTGARRFDDGAIRWCANLLATEESRLREVLDYIPRQYTCFHVRKRSGGFRYISAPAGDFRSMQQTIYHRILLLANIHPAVTGFCPGKSVSDNARVHLGRKNVLKVDLHDFFPSIRSPRVRAAFREMGYSRPIAKVLAELCCLRCCLPQGAPTSPALSNIIAYPMDKKMMALAGEYGLVYTRYADDLTFSGDYLPKDEVLVRIHRIIREEGFTMNVKKTRFLSEHKRKIITGVSVSSGKKMTLPKVKKREIRKNVHYVLTKGLVGHQEHIGSTDPVYLKRLLGSLCYWRSIEPDNRYVSDSITALKRLM

SEQ ID NO: 8043 - protein, 562 aa, synthetic construct
KTLKNIEDRKDLADYLNIPIKRLTYILYIKRTENLYYSFEIPKKSGGVRNIDAPKSELKALQKKLAASLTKYQEILQKSKRKAPNISHGFEKGKSIISNAKIHRNKKIVYNLDLENFFESFHFGRVRGFFEKNKDFELSTEVATIIAQLSCFNGALPQGAPSSPIITNFICRIMDMRILKLAKNYKLDYTRYADDLTFSTNDKKFIDQIDYFLHKLTKEIEKAGFKLNKNKTNLNFKDSRQLVTGLVVNKKINVDRRYYKETRAMAHRLYKTGEFQIDDKNGTLNQLEGRFSFINQVQRYNNVIDSSKHDFNNLNAFEKQYQAFLFYKYFYANNKPHIVTEGKTDINYIKAALKKHHLEFPNLIVKKEDGEFDFRVAFLKRTNRLAYFLNIKKDGADTMKNICKYFFDIENNEVPNYLKTFKILTKQIASNPTILIFDNEISNNVKPVSKIIKYIKLKEDSRVMLTEKSYLNLEDSLYLLMNPLVKNKKECEIEDLFDEATLNHEINGKKFSREKNMDLNKYYSKERFSNFIYNEYREIDFSNFKPMLENLNFIIENYKNEK

SEQ ID NO: 8044 - protein, 455 aa, synthetic construct
DHFSSVVDNYILQTNKDGHYCWRPFELIHPAIYVHLVHKITEDESWQLLLERFGEFQSNTKIVCASLPRESEEDGVSDKAKAVSGWWRDVEQESINKSLQFKYLFSTDIANFYPSIYTHSIPWAIYTKEDAKAARGAGRNLGDQIDYALRQMRWGQTNGIPQGSALMDFIAEIVLGYADELLGQKLESQNINDYHIIRYRDDYRIFTNSKEDAEAIARHLTVILQGLGLQLNASKTSLTEDLVLGSMKPDKQEALMVFGRSVNATTIQKTLLKLVIFSRKYKNSGQLEAYLAKINKRLERMSSIKEEVRAIVSIISDLMINNPRTFSSCALVLSNVLKFVDNDVEKLELLKQIKDKFKPILGTGILDIWLQRISYHINRDIEYKETLCSIVSGVHDRPHEHVWNSEWISDNNFKNSIMATSFVDNDKLQACEPIIPEEEVTLFPYDSDVDEEDLE

SEQ ID NO: 8045 - protein, 541 aa, synthetic construct
KDLTAKDLIGKGYFPKEIPKGFSTNSLAEKFSNLDFSTFTKKERGKWYKTSNISIPKFAHSRRILNVPAPFPQMRLSQLLVKNTEELNEYYSQSKLSLTRPIVKEESDRAVERKYHFSKIIERRIESINDKKYILKTDISRYFPTIYTHSIPWALHTKEVAKQTRGDSLLGNTIDEYVRNIQDGQTMGLPVGPDTSLIISEVIGTAIDIKLQEAHPNIIGSRYTDDFEFYFKTQSEAEKVLNTIQEIVRHFELDINPVKTEIISSPNLLEPIWLSNLKLYQFRSSATAQKNDIKTFFSTAFYYQNQSPYEGVLKYCLKKIKNLKIKEDNWSLFEALILHIMLIDPTTLPLIENILFGYKEIGYPINEQKIKDTIAEIFASNIAVGNNYEIMWALSLSNKLQLKISNESSKLLFNLEDSFSNILTMEAYTNGYIEGGYEPEYFKTLLNENELYGRNWLFAYEMSVKGWLKPHQQKEYVKKDTFYNQLFESKVEFYHNDRKAEIKNDDWLTALLNDDDIEELFIQNASSKKPYLRGGSGGADY

SEQ ID NO: 8046 - protein, 349 aa, synthetic construct
KASKLRPRDFLQCLLSTAYLPEELPPTVTSREYSEFCRRNYALVRAEKDKLIKLATSYDTYSAPRNVPGRRALAVVHPLAQLGVSLLITERRAEIRSLLKKSGTSLYDVSEAAAQAKAFAGLDFQKRRTLAAKLHSEKPFILQADISRFFYTAYTHSIPWAVLGKEKAKELLRTNRKKLNAHWSNKIDEALQSCQSRETFGIPVGPDTSRVLAELLLSGVETDKSLSKYLQPTNAFRLLDDFSIGFDNEADARQALRAIRQVLWRYNLQLNEEKTKIITSPLIFREKWKLDFDKAPLSQIDPQQQLRDIEYLVDLALNACFESRGNSGSMGLPPPKSGDSSRRHLSHLA

SEQ ID NO: 8047 - protein, 487 aa, synthetic construct
APDKDFVLIALLKYNYFPAHKKEKEELPPIFSTKQFTKKIAQKLSHLRSRKDGYDQISYKITRYNNIPRVLSIPHPKPYADIVFCLSENWDNLAYICNNEVSLIRPRQHKDGRIIIMNYEGSHEKIERSLKKSFGHKFCIETDITNCFPSIYSHAIPWALIGLKEAKSRKRYKNEWFNKIDARQRMLKRNETQGVPIGPASSNIITEIILAKVDEVMSKDFNYIRFIDDYTCYCKKYEDAEEFARRLSQELSKYNLTLNLKKTHIHQLPKPTNDDWIIDLKSRISGDSKKITHYQAVNYIDYAVSLNKKIPDGSILKYAFKSIRGRLNVKDERFCLNYILLLAPHYPILIPIINKMLHNASKKDKFVYEKELKYILDESIVNHRSDGMCWTLYYLLKNKVTLSPEIAKHIIATKDCMAILMLYLFKKFDTEINGFANGLDKTDLYGLDNYWLLLYQLFYDNKIKNPYKDEETFKILKDNNVNFIQSK

SEQ ID NO: 8048 - protein, 644 aa, synthetic construct
SNIDDRMREVRAVLTETLPFELPLGFTNENLFLSELRLDQMTGVQQNYLNRLRRPHNNYTKPYLYSINRSRRSKNTLGLIHPAVQLRIATFYSEFEQTIIQACGRSTFSIRHPYEALRIYSKDSAKDVRKRWKLALPGENVGHAIKTSYTSSYFAYRKYLLLDKFFSSNEIIRLEGKYSRLRMLDVSKCFFNIYTHSISWSLKDKDFSKKNAKNYSFEQQFDTLMQHSNYNETAGILVGPEVSRIFAEIILQRVDVELERAVSKRLKLECGRDYDIRRYVDDFHLFANDEDVLDKVEGVLAEILETYKLFLNTGKSEEVERPFVTGISRLKFEVSGICAKLYDELTVDLSNNEESSAEARETLRKARVSLDALRHIGGTERALLPSAMSEVFTTLSRIVRSLNKMTELDLSEAQSEDLIARVKTVVRVLFYLSAIDFRVPPIIRLSLILKEVVRLSKKLAQPYRETITGYLVYELSELMATHYVEEAEAVGLEVANTFVLGLVVEPALFAMQESSAKFLHNVLTGKHKCYFSVLCALHALNSVENIKEDEKNAFVDGLINRILSNDFEIEVSCEEYLIFCDALSCPAIDRDVRWQTFQDKLGGQGLSKAAFDELALCFRHINWDANGPGFELVQRRLPPVYFSG

SEQ ID NO: 8049 - protein, 524 aa, synthetic construct
PMLKLAERSLDWALLHIEKYGDTDIFPVPFEFEAIRYQWEQSMRSWLRSQDILQWTPRPYRRCLTPKHRYGFRVATQLDPLETIVFTSLVYEIGKDIESARIPKEEKIAFSHRFAAKPDGRMYDSEYSWDLFQDHCGELVESNDYRYVVIADIADFYPRIYFHPLENALSECTRKKNHIKAITSMIKNWNFSVSYGIPVGSAASRLLAELVIDDVDRGLLSEGVKHCRYVDDYRIFCKNEREAHEHLALLANTLFENHGLTLQQHKTRILPIEEFYNHYLQRENSQELNSLSAKFYHILDSLGIENRYEDIDYDDLAADVQAQIDNLNLMGILKEQVLETEAIDIPLVRFVLKRLKQIDSEESVDFVLDNINQLYPVFKEVITYITSLRSLNTADKHEIGKKLIQLLEDSIVSHLEYHRLWVFDTFTKDREWDNEGKFVNLYNSYHDEFSQRKLILALGRAQQHSWFKSRKRTVNQMSPWLKRAFLAAASCLPGDEAEHWYKSLQGSLDPLELTITKWVQANPF

SEQ ID NO: 8050 - protein, 561 aa, synthetic construct
QSNDEVDYIVDPAFWLNGQALGFPVNFELVLKHLRQDMRDDWYYDCLQYDDLFKDPSEAKRIIISLLQEWNGEYRGTRSVVRNIPKQGYGERYGLETDFFDRFVYQAICSFLIPFYDPLLGHRVLSYRYEPTPIKAKYLFKNKIDRWFTFEGVTLTFRKSGLYLLITDLSNFFENVSREQIIKALEQAVPNLLATGPQKLHVRNAIATLDRLLGQWTYSGDHGLPQNRDASAFLSNILLSNVDRKMAEKGYDYYRYVDDIRIITDSETHARRGLQDLIRELRTVGLNINAKKTEILAPDVSDEKVAKYFPSQNSSTIAINQMWQSRSRRVVTRSVTYIFEILSKCIAEWDTQSRTFRFAVNRVAKLVDSGLFDVGDALSVELLDTLSQSLSEHAVSTDQYCRLIATLDHGGRCLPSLEAFLLAEDGAIHDWQNYNIWMLLAVRQHRSDDLVALAERKLQADMKSGEAAAILIWLRCVDEKALIARCLEEFANLPFQNARYLLISASVLEEEVLRPLYGHVPTGLRGTGHRTQRHCNEDGLPFAPRENTDLLNLIDEISGYD

SEQ ID NO: 8051 - protein, 604 aa, synthetic construct
LTDRFHQIRKEELENLFSKKNISDVWRKIVRDQLRRVDILDTFDYYDFNYNIDERALLLRTVLLNGNYQPSQPLIYRIEKKFGICRHLVIPHPLDALVLQVITENISQQILNNQPSKNSYYSRDKHNLRKPHEIDEYGYHWRRLWKKMQKQIYQFKEEKELIIVTDLSNYYDSIYIPELRKVISGFIDKKESVLDILFKIIERISWLPDYLPYTGRGLPTTNLEGVRLLAHSFVFEIDEVLKSKSNESFTRWMDDIIIGVNSRTEAVNVLSSTSDMLKSRGLALNLKKTNIYSSKEAEFHFQIEENQYLDSIDFDYHIEHGIRKIGSELSKRFTKHLKNNVSAKYSEKITKRYITSFAKLQSKQLLKKVPVLFNEIPGVRGNLLYYLSSLGFSKRTSEIVLNILKELKLHDDISLFNVCKLVTDWEIPITKESDAFIKAFIKQVKSFSIQRKQPFDFYCLIWVKTKYEHPDELLKFINDYDYIWKTHPFLRRQVTSIMGRLLNYRKDEITKFLQSQIATSEPQVVSVANSILEFSKIKTVEQKVKMYLFPQSKYRTYPYQKFLVLCSFLNSEVYSKNEDIKKKVLENISDPYYLKWLDYQYNIK

SEQ ID NO: 8052 - protein, 447 aa, synthetic construct
QVTLLREERMRSFLSQVCDQLNMRWAWEKVKRASVPGDIWIDEADLAHFEVHLGHELRGLGDDLLSGRFRMSPIRPMVFPKNPDGDGNPRVRQYFHFTVRDQAWVAVVNVLGRYIDEQMPVWSYGNRLFRSAWIEEDIHGNKIRKIGPYRHSSGRIYRLFQQSWPLFRRHIALAVSAAAHGYSKVDSLDDDEREELGFQRRMHRANQCPFVLADYWTNLPTGPNESDVYWASVDLEKFYPSIPLTACVDAISQFVPAELRPEVQRLLKTLTQLPLNLDGWTDAELKHIELDESRKTFHKIPTGLMVSGFLANAALLPVDQEVQKTLPRGRVAHFRYVDDHVILTKTFDDLITWIDHYKDVIDNLGSGASINPAKTEPKALGELLGTSDTSKRFAGSDLWNRAQKECRLDPEFPTPLMTKTIALVSAIGKTDFTALEDNELSILPQQL

SEQ ID NO: 8053 - protein, 1300 aa, synthetic construct
LLPTLRGHATFGVDVRHTQKITGHGMTNKTDKYAALAPRIEYLSDVVVLSQAWKKTHTYIRHHNWYADTLELDCSAVNLDGELSQWSAELRDGTYTPKAARLVPAPKSDPWVFGDAEINGWAPVSSSEHFLRPLAHVGIREQTIATAAMLCLADCVESAQGDTSLDALDAQKAGVFSYGNRLFCSWTDQGARARFSWGNSNVYSRYFQDYQSFVERPLLIAQSAVLSGQDALTLFVIKLDLSAFYDNINIEGLVEKLTELYWRYSETIAPTAKTSSARFWATLAKSLSIGWQVEDAKWAPYLKGQKLPSGLPQGLVSSGFFANAYLVDFDEAVGESIGRSFNRRGVKFRLHDYCRYVDDVRLVVSCDKQVPSEEELGLALTEWVQARLDSKANDVEFEERLVVNEQKTEVQPFASLGGESGTAARMKSLQSQLSGPFDIAALQHVEAGLNGLLAQAELGTAAKQKVDGGRNLPPLASVVRPKREVRDDTLTRFAAYRLTKALKLRRKMTDLTQDEEAGLSRNILLHDLEVAARRLVAAWSLNPGLAQVLTYALDLFPCPELLKTITDALLTKVLGTQEDAYSTGTALYTLAQLFRAGASQTGKYWESDGSLQVGDVERYRLELGQLARMLIDEGVLPWYVRQQALLLLASLSQVITLDTSFDELPYHRSLHEFIGKRVDEGLPHIEETIAVSLVGHQLLRDDAHYAMWFAALSRQSTRKDRLIALELLAQNQPHLLRVIAASRSNRQLAAEPAFQSIVRYFSSFKEPEDECALVDGEWLSFGDIVKMRDTPFHEENALLQLAFALADAVSRTDELPEQWTPQTIQVRCEDWALLSDPRGMPRLSIRIGPTRGRRDPRYRTPEWCNSEDAILYAIGRVIRCAATGELDFTARQWLLREENIGWYRGISSTWKKRQIGMLNTSVAMAGTTAAITPWFSELLLRLLRWPGLQAQLETSSSVGVVTDAAMLRDLVHERLKAQAALFGKSSNLPIYVYPVDWPIDESRLLRVCVIQGLLPTTKDFDGGLASLHKEGFRARQRNHTASILYLAYQQLQARDSVLGKDHKPYVDLVVLPEYSIHLDDQDLMRAFSDATGAMIFYGLCGATHPVTSEPINAARWLVPQRRNGGRSWVEVDQGKKYPTTEEETLGVKPWRPHQVVIELSSGGAGKFRISGAICYDATDISLPADLRDVSHMFIVSAMNKDVKTFDSMVGMLRYHMYQHILVANAGEFGGSTAQAPYEQEHKRLISHNHGSDQISVSVFDVDINHFGPNLQATKVTLDPSGKKKRIGKTPPAGLMRDSVQ

SEQ ID NO: 8054 - protein, 315 aa, synthetic construct
RPLAHVSIKDQTIFTALMMLLANHVETEQGDTSTSFYDVHAKGLINYGNRLHCKYSDNNAIYSWGNSNTYSKFFTDYQRFLERPIHFGREAKRVKTSKEEIYEIHLDFSKFYDSVNRGILTKKISALVEKITGAETDECISHVLSKFRNWKWTEKSKELYTGVCKNKHIETLKDNRGIPQGLVAGGFLANIYMLDFDKAISKLIGQYLDDNETILLIDACRYVDDLRLIIKADKNEVSENKIREVITTRFKSYYDELELILQPQKTKVKKFSSKDGAISSKLAHIQNKISGPMPLHELDEQLGHLEGADRTNRQP

SEQ ID NO: 8055 - protein, 336 aa, synthetic construct
KRVGLLFERVVAFENLLHATRQAARGKKSQLRVAHFLFHQEKECLRLQTELKQGIWQPSGFRVFEIREPKPRRISAADFQDRVVQHALCNILGPLCERRLIFDTWACRRGKGSHLAMKRAQAFSRRFPYFLKCDIRRYFDSVDHTILKRLLWRLIKDKPVLNLLDRIIDHPLPGALPGKGLPIGNLTSQHFANLYLGELDHQLKDRMGVKAYLRYMDDMLIFADDKSRLHELVTGIEDFVKQHLQLSLRPSATLVAPVSEGVPFLGFRIFPGLVRVNGQALRRFRHRLRLHEKAYQTGKMDVESLTASVQSMIAHLQHADTHRLRQSLLSSSCALG

SEQ ID NO: 8056 - protein, 361 aa, synthetic construct
FFLRIVMKRIGNLYESVVSGESLWEGYLGAKKSKGGRRGCFQFEKSLGRELNELQEELANNTYKPRPYFKFIVYEPKKREIYAPAFRDCVVQYAIYLRVMPIFDKTFIDQSFACRTGLGTHKAAEYAQDALRRAGPNTYTLQLDIKKFFYSIDRPTLRKLLERKIKDKRLVDLMMLFADYPEPKGIPIGNLLSQMFALIYMNPVDHYATRVLKPAAGYCRYVDDFLLFGLTRAQALTYRKLLTDFVEQKLKLTLSRSTIANTKRGANFCGYRTWRSGRFIRKHSLYKTRKAVRANKLESVISHLAHASKTHSLQHLLNYAEQQNHGLYCQLPKIYHTRHHQAVERSGRINGVMRNRCSNVC

SEQ ID NO: 8057 - protein, 999 aa, synthetic construct
IDNKLFTFQQIYEAYRKLKSYIYYDNTSLFIRKEFSSFESSILAGENFEDNFKKKMKSLYDILNSDNYQTDLDKLVSKIGYKLVPKSIKKKESTIVTNIPHTGKIEVESYNILIDAPIEIHIISVLWLIVAGKELCKYVNENNYAYKLLLLDESYLPMTDIKIETNKENYVVTGLQLYEPYFIGYQNWRDNALNSATKLLDDNKDATILSLDIQRYFYSVRIDLDSIKNRCSHSNKQIEKCFHLLQIINKTYTSKINKLLDIPLTNDELNAGYTILPIGLLSSGLLGNLYLEDFDKTIKEELNPAYYGRYVDDILFVFSDRKVKLEVNNPIHDFIDRYFIKKNILETILDENNITYLLPVGSHKLKIQSEKVILEHFNHKESRAAINIFKKNLDKNRSEFRFLPYEENIDNEFDNEAFSMHYSDSINKLRSIKEFKEDKYGASKFLAHKIFLSKISPNEKDYNRKYFFQSSKQILTFFKGSTALSLYTLWEKVATYFVINNESKCLIIFYNQVLNTINNIKTVNGENKIKEDLKEFLFISIAMPISMRMNIKIDNNNDDVVIHKLADDIRKTNMFRQNLLGISCINYTDYIDHITNDLFHINIKNIKDLKIQINIAKFISPRFVHYHEFNILNIYQVFSSINKESDIRLFDKIQDIAFNQYKEFNYDWRFLYSNTDPIYPKDFFTLTQSENSNCKNINILEDNEVECNKKIGLANIEVSENDILSAIKMIPNISKERRKRIFEIMNYSHKKHVDLVVLPEVSVPFEWIDFFAEQSKNNNIAFIIGLEHVVSSYNFAYNFTATILPIKQKEFTTCLVRIRLKNYYSHSEKELLKGYRLINPSEIKPELKLYDLFHWRKSYFSVYNCFELANISDRALFKSKLDFIVATEYNKDINYFSDIAGSWVRDLHCFFVQANSSQYGDSRIVQPAKSDFKNMISVKGGKHPVVLIDELQIDKLRDFQNKEYNLQKELIDKEKTHLKPTPPDFNKDNVLKRIKDEPI

SEQ ID NO: 8058 - protein, 422 aa, synthetic construct
REQSFDKFSLSKRIKQSDFYKCKNLVDEKVFDQVIEESYQLAHGLTAPVISKTISKGKEVYYVDRLSYKLILRKLQGNIRNKIETDKLQRNEIVRNLVSYLQEGVKSKVICIDLKSFYESIDIDSLLSETAKIGSLSYHSKKLIEVVLDEHRSIGGKGVPRGLELSSLLADLYLQEFDEWIKRIDGVFLYKRFVDDILIMTDHKVDEQSILTSIKNKLPANLCINNLKTQIIEIKKRTHSPNDVEGKLAATIDYLGYKIKVIDTHIPPAANGASSEGKANSVYRKVVIGVSDKKLNKIKTKLCKAFYNYELNRDFTLLLDRIIFLSTNRLLINKDKNRKMPTGIFYNYPLVNDDNESLKVIDFYIRALILGSGCRLSKKLNGSLNNGQVKTLLKISFAKGFSNKIHKKYSLNRLKEITRIWK

SEQ ID NO: 8059 - protein, 349 aa, synthetic construct
VGRHEKNSVLEISFKYAPRGVELVKARSEGAAPLPTEPRGQRESARPIAYIKARTTAVRRVTLSVVHRYGRMHTLATKKLRKISCPPTFKKETKFLKSSEIEKFKNSQKKVFDVEALYTNIDNRAAYQAVVDKLKKNASVIDWYGDSFTHIKMLLKSCLEFNGFQFDGRIYEQKRGLAMGSRLAPVLAVLYMDIIETPSKVHPIILFRSYIDDYIVVAESQDTLDNIFTCLNSQATHIRLTREAPKMDWLSFLNCELRFKNKVFSSRWYRKPSNKNLLIRMDSGHPKQQKINTISTTQKTATENSTIDQRSYSRNLANEGNFDGKKNRLSNAKKSENFRSSLQNRIDFV

SEQ ID NO: 8060 - protein, 393 aa, synthetic construct
DVEIQFENLYAQTAELVSSSKDNVESFKSTLVDCCFRYLNHGHSSKGILTNKHKEALRKLKTNDNLLITKPDKGYGIVLMDKNNYINKMKAFLNDQSKFQKLVVKNDLADKIEKQIIDSLKQIKQQGFISEKVFEMLKSIGTRTPRLYGLPKIHKSGLPLRPVLDMNNSAYHTIAKWLMQILKPLHKEIVKHSVKDSFEFVNNIKNLSLKNKFMISLDVTSLFTNIPLLETVDFICNELTERHTETVIPVTAIKQLILRCTMNVQFRFDNEYYRQLDGVAMGSPLGPILADIFLAKLENGPLKDTISHLTSYCRYIDDTFIVLEKEHEKENILNIFNNIHPSITFTLEEEQNGSISFLDVQLTRRIDGTLKRGLHRKSTVGQYTHFYRAVSIK

SEQ ID NO: 8061 - protein, 262 aa, synthetic construct
RSELIEIMNQCRAFRLTMDLKRYYLTKPNGKYRPIGSPTLGSKVISKALTDIWTTIADKRRGVMQHAFRPKLGVWSAAFAVCQKLRSRKPSDVIIEFDLKGFFNTIKRNSVQEAANRFSLLLGNCVRHIIDNTRYVFEELKPETELHIINDYTHHKYKRAIPIYRTGVPQGLPLSPVAATIALENEVNMPEMVMYADDGILIGGKEKFAEFVKKAIRVGAEVAPEKTREVTKEFKFLGLTFNLEKETVSNGDSYRFWNDKDL

SEQ ID NO: 8062 - protein, 264 aa, synthetic construct
DNIHTAKHLISPHCYLASIDLQDAYYSIPVDPNSRKYLRFMWQGERWQFAALTNGLSTAPRLFTKLLKPVFAELRQAGHTVIGYLDDTINIGETKEKLKESVMRQHFENRGLSRRTVDIITASWRASTCKQYQVYITQWRRFCHSRNTSYLQAEVETVLEFLSSLFHDRNLSYRNDNYPSRLQEARVPLLPRSTCTRQNVYGNKLTPQMLCAGYLRGGIDSCDGDSGGPLVCENSNSVWKVVGVTSWGYGCAQPNAPGVYAVVT

SEQ ID NO: 8063 - protein, 584 aa, synthetic construct
SPSRWLIRTIRLGYAIQFAKRPPKFTGVYFSRVNPLSAPVLREEIAALLAKGAIEPVPPAEMESGFYSPYFIVPKKSGGSRPILDLRVLNRCLHKLPFRMLTQRRILQCVRPRDWFAAIDLKDAYFHVSILPRHRQFLRFAFEGRAWQYKVLPFGLSLSPRVFTKLAEGALAPLRLAGIRILSYLDDWLILAHSREQLIMHRDEVLRHLRLLGLQVNREKSKLAPVQRISFLGMELDSITMRLLGHMASAAAVTPLGLLHMRPLQHWLHDRHRVSVTALCRRALSPWNDPSFLQAGVPLGQASSHVVVSTDASNTGWGAVCRGHAAAGLWKGAQLHWHINRLELLAVFLALHRFLPVLERQHVLVRTDSTAAAAYINRMGGMRSRRMSQLARRLLLWSHPRLKSLRAIHVPGTLNRAADALSRQLLRPGEWRLHPESVQLIWARFGEAQIDLFASPENAHCQLFFSLTEGSLGTDALAHSWPRGMRKYAFPPVSLLTQFLCKVREDEEQVLLVAPLWPNRTWISELSLLATALPWRIPLREDLLSQGQGTIWHPRPDLWNLHLPLKKQTVTGSIIAESLKGYML

SEQ ID NO: 8064 - protein, 890 aa, synthetic construct
LPPTGALSQTLQSLTDSKIQEVEKLRGLYESQKTSILHEADQVTNHQERVARILVGIKRYYPNEYHDPEVRNIEQLLDQARYDSSIPPETLQKFESQLRARLETKSRRLGLADLYCRLLTEWMQPPTDPEKGKEVATIEDDFLLVEGKQKQKLKELCDQFESVVFEPRETNADEIRGFLDGLFATEESAKALEELRARIHLQCITFWEEEEPFNPDALAMCIRGLLTEDLLSEEKQDTLKYILENKVALREISDVLNMRYADLGNWDWRAGKDGIPVLPRQQVNGKYRIWMDEDVLQAVFTQYIFIRLCNMVKETLTDFIGDGRVWDWGRSREMTERDKLRWKYYFNLSSPASFGVDAVRKQEFLERHFLYQIPSTQTTLQERGGAYDDDDGDEGSYAAPSEVPKNIKQQLLRKIATETLIQRQVNGRAAVVQSDLQWYATALPHSTIFAVVKYLGFPEKWIRFFEKYLKTPLNLIRSFEDSQSGPRIRHRGVPMSHASEKFLGELVLFFMDVTVNRKTGMLLYRMHDDLWFCGEPEQCVKTWEVLQKYARITGLDFNYSKTGSVYLADIVDEAVVSKLPQGPVKFGFLILDPKSGSWVIDHSQVEAHIQQLKKQLDHCDSIISWIRTWNSCIGRFFRSTFGEPAFCFGRPHVDAILATYAKLQNTLFDDQRQCGALRVTEFLRQRIKSHYGEFDIPDSFFFLPEELGGLGLRNPFVPIMLVRGNIENSPIDLCDKFKKEEIEDYVAAKKAFEDLHERARLRRLDYINREADSRLGQIIKTSEMNHFMSFEEYTRFRESKSTRLRSCYEELMRVPERMSLFSTQIVRDELHRTGRSRLGHLDLETKWLLNLYADELLANFGGFDLVDKKFLPVGVLNMVKGKKVKWQMVL

SEQ ID NO: 8065 - protein, 872 aa, synthetic construct
AASSLSTLQHVTLQKLNKLDSQRQQFESDKKSILEQVSSVPDHRSKVEALLDGFELHGIAPKQADLSISNLKHFVHQAKHDPSVSASLLKDWQSRLEHELNVKSNKYEYAALFGKLVTEWIKHSTLVKSADVSDGSIAKGRKKMQEQRQSWENYAFVEKEVNQSTIEQYLSDIFGDALQTEKIKKSPLRVLRDSMKEVMDFKSDLDTSEKDFSSNKRFGHSAPHGSRFTIELLQSCIRGVKKADLFTGRKLEMIIDLEKQPAVLKELVDVLNMDVDGLDHWEWDGPVPLNMRRQTNGKYRVYMDEEIHQAILLHFIGKTWAVALKKAFTNFYHSGAWLQAPYRSMPKKIRQRREHFIENSNKSGDSVRNYRRQKYQQEYFMTQLPSNAFEDAREYDAAEGQEKNSHIATKQTMLRLLTTEILLNTKVYGECSVLQSDFKWFGPSLPHDTIFAVLEFFGVPAKWLRFFKRFLEVPVVFAQDGAGAKARVRKCGIPNSHILSDALGEAVLFCLDFAVNRRTKGANIHRFHDDLWFWGQETTSVQAWEAIKEFTEVMGLQLNEEKTGSSIIVADKSRARVPHPNLPEGNLHWGFLELDASAGRWVIDRAQVDEHITELRRQLDACHSVMAWIQAWNSYVGLFFNTNFAQPANCFGRQHNDMIIETFSHIQRSFFGKYGTANVTEYLRSVLKERFQTTDAVPDAFFYFPVELGGLGLNNPSISAFATYQNSSRDPSARIERAFEEEREAYDTAKQRWDAGDVPCPNRETDEPFMSFEEYTAFREETSHPLFEAYMNLLECPVEERVETSDEMYEALRRSDAPHALGSNHYWLWIFNLYAGDLKQRFGGQGVQLGERDLLPVGLVEVLKSEKVRWEN

SEQ ID NO: 8066 - protein, 1061 aa, synthetic construct
ALVDTGAETSIIYGDPNQFSGSKAMIGGFGGQMIPVTQTWLKLGVGRLPPREYKVSIAPIPEYILGIDILSGLTLQTTVGEFRLRERCISIRAVQAIIRGHAEIEPICLPQPRRITNTKQYRLPGGQQEITKTVQELERVGIIRPAHSPYNSPIWPVRKPDGTWRMTVDYRELNKVTPPIHAAVPNIASLMDTLSREIETYHCVLDLANAFFSIPIAKESQDQFAFTWEGRQWTFQVLPQGYVHSPTFCHNLVASDLANWNKPSTVKMFHYIDDLMLTSDSIEALEKTVPSLITYLQEKGWAINPQKVQGPGLSVKFLGVVWSGKTKVLPSAIIDKIQAFPVPTKPKQLQEFLGILGYWRSFIPHLAQLLKPLYRLTKKGQVWDWGRTEQEAFQQAKIAVKQAQALGIFDPTLPAELDVHVTQEGFGWGLWQRQGSVRIPIGFWSQIWHGAEERYSMVEKQLLATYSALQAVEPITQTAEVIVKTTLPIQGWVKDLTHIPKTGVAQSQTVARWVAYLSQRSRLSSSPLKEELQKILGPVTYHNGSSRGNPSRWRAVAYHPSTETIWFEEGDGQSSQWAELRAVWMVITQEPGNSALNICTDSWAVYRGLTLWIAQWATQDWTIHARPIWGKDMWVDIWNVVRHRTVRAYHVSGHQPLQSPGNDEADTLARVRWLGNTPSEDIAHWLHRKLRHAGQKTMWAAAKAWGLPIQLPDIVQACQDCDACSRMRPRPLPETTAHLARGHNPLQRWQIDYIGPLPRSEGARYALTCVDTASGLMQAYPVAKANQANTIKALTRLMASYGTPEVIESDQGTHFTGATVQKWAEDNNIEWRFHLPYNPTGAGLIERYNGILKAALKADSQSLQGWTKRLYETLRDLNERPRDGRPSALKMLQTTWASPLRIQITSKDTSLKPQVGTMNNLLLPAPDDLEPGRHKVKWPWKVQAGPKWCGLLAPWGRLLEVGGSVNPSVIGVWPTEVIVDTPVFIARGTLIMSMWQIRTPPLVPDIVIQSQISGQRVWYRRPGRAPIQAEVLTQDRNTACILPWRADLPLLVPIKHLFYSP

SEQ ID NO: 8067 - protein, 449 aa, synthetic construct
VKSLCQPRKHQGGHQVIHEFLCIPECPLPLPGRDLLSKLGVQVTFSPEERPTFRVGTPTNLLSLSVTPQDKWRLREPPGDKQGQATEVERRLTQLFPEVWGEDNPPGLARHQAPMIIELKACATLVRKCQYPIPRGARIGILPHISRLKQAGILVECQTAWNTPILPVKKEGGQDYRPVQDLRLVSQATVTLHLSVPKPYTLLSLLPPKTRIYTCLDLTEAFSRICLAPASQPIFAFEWDDPIGGNKQQLTWTHLSQGFKNTPNIFGEALASDLEPFQPERYGCCLLQYVDDGLLAAETWVECCEGTPVLLHLRAEAGSRVSRKKAQICKEEIRYLGFVLRGGTRLLDQSRKEVILRPHTPKTHRQVREVLGATGFCRIWIPRYSQIAQPLFELLTGPEENPINWTEKQQKAFEELRLAFTSACALVLPDLPKPFTLYVTGKDEQPWGF

SEQ ID NO: 8068 - protein, 878 aa, synthetic construct
PEIANDGSQSHITFFLCASLLFPMEARSYWGDSPCCSPQLDDIVDHDGLQTKRSSSSPQGAPKKRTAFVDITNAHKIELCNPIKKKDPAKKVQKTSVLLKNDVNLKSIVSPEEKLEELKNVESDIEETSCKDPIPPHLLPPEIPPEFDIDSEHLSDSSHTSEYAKEIFDYLKNREEKFVLCDYMVDQPNLNTNMRAILVDWLVEVQENFELNHETLYLAVKVTDHYLAVSQTKREALQLIGSTAMLIASKFERVEDICLNWRNGHLTNILLCAQHAEDKLTVKQEQDKKKAERELCMALVQVANQRSNQHLTTKFKGDKGVKGEKDTRWRNWYVTYGDETCRACRARDVNRYQMSALATEMDFWLRIDPKGANQQRGADVRRGKSRMERVWANSQQLQDIMSPGELHCTSHVVTDRDAEFEKAWFEANVNETLILEKMYWKDSLCAVSVSLSEKQRSFYLMSAQAVPHISVCKGKHQSWADLGPFEKQCLEVKDCISREGGVEWSALSQAFRVDSETETAVSRTVTAIDKHCVKNSCMVDFNAADIHPALAEILSELWAKSKYDVGFIKGCDPVTIIAKSDYRPCQQQYPLKREAIEGITPVFEALLEQGVIVPYNNSKVRTPIFPVKKIRDNGMPTEWRFVQDLQAVNAAVKQRAPLVPNPYTILSQIPEKSQFYSVVDLANAFFSVPVDKDSQFWFAFNFNGKGYTFTRLCQGFTASPTLYNEALLRSLEPLTLTAGTALLQYVDDLLICAENEETCVKDTVTVLRHLAKEGHKDMQTFATGLEKNKWRQSGCVMKDNVKAAQGKAAERPLHSLRPGDFVVIRDLRRKSWRAKLWLGPFQVLLTTETAVKVAERATWVHAGHCWKVPSPEKDSTRE

SEQ ID NO: 8069 - protein, 365 aa, synthetic construct
VHGTLLVLQGPFVSAGGHLVIHEFLYLLGSPIPLPGRDLLTKLGAQITFAPGKSASLTLGRQSALMMAMTISREDEWCLYSSGREQINPPRLLKEFPDVWEEKWPPGLAKNSVPIVVDLRPGATPVRQKQYPVSQEACLGIWDHIQHPQNAEILIECPSPWNTPILLVKRSGGNDYRAIQDLRTINCSDHHPSSGPKFLHSLESLTHSGKLVHLPRSHGLILLPPAVTSQPLFAFEWEDPHTGRKTQLTWTQLPQGFKNSPILFGEALAANLAAFPSETFNCTLLLYVDNLLLASSTQGDCWRGTKALLALLSTTGYKVSWKKAQICRQEVKYLGFVITKRHWVLRHERKRAICSIPWRDTKKEV

SEQ ID NO: 8070 - protein, 935 aa, synthetic construct
VVGTLPLNLLGLDMLKGKSWTDDKGREWMFGVPSLNIRLLQTAPPLPPSNLTCVKPYPLPLGARSGISPVLAELKEQGIVIPTHSPFNSPVWPVRKPNGKWRLTIDYRRLNANTGPLTAAVPNISELIAAIQEQAHPFMATIDVKDMFFMVPLHPDDQLRFAFTWEGQQYTFTRLPQGFKHSPTLAHYALAKELEQIPLEEGVRLYQYIDDILIGGDHLTPVKIMHDKIIKRLEELGLTIPPDKIQSPAAEVKFLGIWWKGGMACIPQDTLSALDQLKMPENKKELQHALGLLVFWRKHIPDFSIIARPLYDLLRKGVSWGWTPVHEEALQLLIFEAITHQSLGPIHPSDPVQIEWGFAHSGLSIHLWQKGPEGPIRPIGFYSRSFKDAEKRYSQLEKGLFVVSLALREAERTIRQQPIILRGPFKVIKSVMSGTSPPDGVAQRASVRKWYAQIEHYCNIFKVTEGAPKTLAIQDDILSTTDTDLPSVVQVAPPYSDQLQNVWFTDASSKREGKVWKYRAVALQIGTDLTIITEGEGSAQVGELVAVWSVFQHESESTTRVHIYTDSYAVFKGCTEWLPFWEKNNWEVNRIPVWQKEKWQDIISIAKKGQFSVAWVAAHQEDGTPVSHWNNRADELARIAPLRQGEPDSDNWERLVEWLHVKRGHTGALDLYRETQARGWPVTREQCRTCISACDLCRTRLGQHPLQDAPLHLREGKHLWETWQIDYIGPFRKSEGKQYVLVGVEIISGLLQAESCPRATGENTVKALKKWFSILPKPTSIQSDNGSHFTSGVVQEWAREEGIHWIFHTPYYPQANGIVERSNGLLKKFLKPEKTNWSTRTSDAVRRVNDRWGINGCPRFNAFYPKAPPLLPITLNPDKLEEPSYSPGQPVLVDLPHVGPVPLTLMESLNKYTWRAKDAREKEYKINARWIIPSF

SEQ ID NO: 8071 - protein, 394 aa, synthetic construct
TVGGKDIDFLVDTSAEHSVVTASVAPLSKKTIDIIGAMGVSAKQAFCLPQTCTIGGHKVIHQFLYMPDCPLPLLGRDLLSKLRATISFTEHGSLLLKLPGTGVIMTLMLPREEEWRLFLTEPGQEIRPALAKRWPRVWAEDNPPGLAVNQAPVLIEVKPGVQPVRQKQYPVLREALEGIQVHLKCLRTFRIIVPCQSPWNTPLLPVPKPGTKDYRPVQDLRLVNQATVTLHPTVPNLYTLLGLLPAEDSWFTCLDLKDAFFSIRLAPERQKLFAFQWEDPESGVTTQYTWTQLPQRFKNSPTIFGEALARDLQKFPTRDLGCVLLQYVDDLLLGHPTAVGCAKGTDALLRHLEDCGYKVSKKKSSDLPTAGMLLGIYYPTGGAQPRIRKKAGHL

SEQ ID NO: 8072 - protein, 1131 aa, synthetic construct
PRAPRCRAVRSLLRSHYREVLPLATFVRRLGPQGWRLVQRGDPAAFRALVAQCLVCVPWDARPPPAAPSFRQVSCLKELVARVLQRLCERGAKNVLAFGFALLDGARGGPPEAFTTSVRSYLPNTVTDALRGSGAWGLLLRRVGDDVLVHLLARCALFVLVAPSCAYQVCGPPLYQLGAATQARPPPHASGPRRRLGCERAWNHSVREAGVPLGLPAPGARRRGGSASRSLPLPKRPRRGAAPEPERTPVGQGSWAHPGRTRGPSDRGFCVVSPARPAEEATSLEGALSGTRHSHPSVGRQHHAGPPSTSRPPRPWDTPCPPVYAETKHFLYSSGDKEQLRPSFLLSSLRPSLTGARRLVETIFLGSRPWMPGTPRRLPRLPQRYWQMRPLFLELLGNHAQCPYGVLLKTHCPLRAAVTPAAGVCAREKPQGSVAAPEEEDTDPRRLVQLLRQHSSPWQVYGFVRACLRRLVPPGLWGSRHNERRFLRNTKKFISLGKHAKLSLQELTWKMSVRDCAWLRRSPGVGCVPAAEHRLREEILAKFLHWLMSVYVVELLRSFFYVTETTFQKNRLFFYRKSVWSKLQSIGIRQHLKRVQLRELSEAEVRQHREARPALLTSRLRFIPKPDGLRPIVNMDYVVGARTFRREKRAERLTSRVKALFSVLNYERARRPGLLGASVLGLDDIHRAWRTFVLRVRAQDPPPELYFVKVDVTGAYDTIPQDRLTEVIASIIKPQNTYCVRRYAVVQKAAHGHVRKAFKSHVSTLTDLQPYMRQFVAHLQETSPLRDAVVIEQSSSLNEASSGLFDVFLRFMCHHAVRIRGKSYVQCQGIPQGSILSTLLCSLCYGDMENKLFAGIRRDGLLLRLVDDFLLVTPHLTHAKTFLRTLVRGVPEYGCVVNLRKTVVNFPVEDEALGGTAFVQMPAHGLFPWCGLLLDTRTLEVQSDYSSYARTSIRASLTFNRGFKAGRNMRRKLFGVLRLKCHSLFLDLQVNSLQTVCTNIYKILLLQAYRFHACVLQLPFHQQVWKNPTFFLRVISDTASLCYSILKAKNAGMSLGAKGAAGPLPSEAVQWLCHQAFLLKLTRHRVTYVPLLGSLRTAQTQLSRKLPGTTLTALEAAANPALPSDFKTILD

SEQ ID NO: 8073 - protein, 1116 aa, synthetic construct
QKINNINNNKQMLTRKEDLLTVLKQISALKYVSNLYEFLLATEKIVQTSELDTQFQEFLTTTIIASEQNLVENYKQKYNQPNFSQLTIKQVIDDSIILLGNKQNYVQQIGTTTIGFYVEYENINLSRQTLYSSNFRNLLNIFGEEDFKYFLIDFLVFTKVEQNGYLQVAGVCLNQYFSVQVKQKKWYKNNFNMNGKATSNNNQNNANLSNEKKQENQYIYPEIQRSQIFYCNHMGREPGVFKSSFFNYSEIKKGFQFKVIQEKLQGRQFINSDKIKPDHPQTIIKKTLLKEYQSKNFSCQEERDLFLEFTEKIVQNFHNINFNYLLKKFCKLPENYQSLKSQVKQIVQSENKANQQSCENLFNSLYDTEISYKQITNFLRQIIQNCVPNQLLGKKNFKVFLEKLYEFVQMKRFENQKVLDYICFMDVFDVEWFVDLKNQKFTQKRKYISDKRKILGDLIVFIINKIVIPVLRYNFYITEKHKEGSQIFYYRKPIWKLVSKLTIVKLEEENLEKVEEKLIPEDSFQKYPQGKLRIIPKKGSFRPIMTFLRKDKQKNIKLNLNQILMDSQLVFRNLKDMLGQKIGYSVFDNKQISEKFAQFIEKWKNKGRPQLYYVTLDIKKCYDSIDQMKLLNFFNQSDLIQDTYFINKYLLFQRNKRPLLQIQQTNNLNSAMEIEEEKINKKPFKMDNINFPYYFNLKERQIAYSLYDDDDQILQKGFKEIQSDDRPFIVINQDKPRCITKDIIHNHLKHISQYNVISFNKVKFRQKRGIPQGLNISGVLCSFYFGKLEEEYTQFLKNAEQVNGSINLLMRLTDDYLFISDSQQNALNLIVQLQNCANNNGFMFNDQKITTNFQFPQEDYNLEHFKISVQNECQWIGKSIDMNTLEIKSIQKQTQQEINQTINVAISIKNLKSQLKNKLRSLFLNQLIDYFNPNINSFEGLCRQLYHHSKATVMKFYPFMTKLFQIDLKKSKQYSVQYGKENTNENFLKDILYYTVEDVCKILCYLQFEDEINSNIKEIFKNLYSWIMWDIIVSYLKKKKQFKGYLNKLLQKIRKSRFFYLKEGCKSLQLILSQQKYQLNKKELEAIEFIDLNNLIQDIKTLIPKISAKSNQQNTN

SEQ ID NO: 8074 - protein, 1446 aa, synthetic construct
SASFPSIPGFAGPLSLKAFLEEYFGLHLTFAAETASPSPRAAATAETPSAAGFRALRDVVLPPNQSFLVVVYVALHASSSPPPTTAHASPTPATPDPGCAAPPTGLGRLRQPLAHQTAVSTAHDTCVTRCNPSDRQNPFCLSSSSTGKNGNARSPWCASASWLLYTNTSHRPFTDALLRHPWRASFSACLGPAAMGFIEMYCPIVLQLEAMAGGVQVIGPALKHVALETSFSATAQLSEMKGLPPRGSASVSSRGVKRAVDTGECSAPLPLQKQRRVEAVASPPKAGRRLQREVAPSHRPCRDDSFSSPVNRAAMPATWAAALTRTDDPRTRLYSVRVSDSDCTGDGGGALPLPAGSLEAHWLPRHPRSLHRVLQAALPKRAAYGASTRHYCAGTGERGTGCTSVKNISMWHVAHVFRWLVLQPSQSGEVAFQTTSPKFDLPSYLRRFLSTDVDQCSRLDLRGAALRHTGYLEEAFRRQQQGVEPWDVQRLSTPVDVVVSYLRTLLPTLRWAPLKEANNGLFWGRDAAGSERVLDALMRAVRGWLIAGRQAVVPVSRFLDGVPVAQVPWLNGFYTTTPSLPFSDATSSASRHARRERSQVQQRVWLQFVLFLTQDILPFLLRASFTITWSSKNTHKLLFFPAFVWRRLVRREVRRTRSCHAPRSQMSLAEERTRMSGADHAALVSAPNACGGAVAAAFPSPHSAASNASAAISAPRDEWRAVRTGGALAHWSARATLATRGGGASCLYAGVRFRPDRRKLRPIAVVRSASLRSLKEMARGSPSPYSHASAIVRLLRRLGCSDADGQLPAATATLLRQVQARSRHNRRTGVHRSAHPLPPHLPHKAALQDALRCLVSGVEEQRVRDGLPRLSNLSHQDEYAELRSFCEEVRGRHAIPCEGPAKTTPAVSSASPPGATACFAPYVTLLRSDASRCYDNLPQGRVLAAVRSLVKHDAYRVLRFTVIHAVDSEATCKGGCLLRRTFTTRTIPCAEAECGFLARIPRGHIYWEEEGRTPTGPHTSAAVSRTTDASSRCGANLISGAAVRALLSEHIRHHLVVVSGGSLFEQRVGILQGSPVAMLLCDRLFSNVVDTALSSILSEHAERSLLLRRVDDVLVATTSPAAAERCLRAMQRGWPSVGYLSNPSKLTLSKACGSLVPWCGLLLHDTTLEVSVEWRRIGVLLGSLRVGDPHYVHRGDYEPLYLTQRFLAVLQLRVAPTALCGRMNSKTRQLQTFYEVGLLWTRVVLEKVQEALPVARNCCVTVLLLRPLAVCVGRLCRLLSRHQRFLAARQSACDVSAAEVRACVLTALHRTVQAKLRVLQARTVRAMTAQSGRTQRGPSLKGRRNNFCSTKASSVGRKGCEQRRRGRNRRNTRVCLRSFWWLTAAEVESQWRRSLGALYRAAPRPGEACGSTASSPSPAASASLLMEDGPLSMHARALSATRLSQT

SEQ ID NO: 8075 - protein, 1201 aa, synthetic construct
GKKRKRPVKEPVKDDPICRAKSSPQQPAGNTARSLSTNRNQAADAGKICHPVISLYYRHVVTLRQYILQRIPRSSRARRRRIAAVGGHSAARDGLAAVPKNEKDLADLLDTTLVGILKELPPTRSEERRRDFIAFTQAQQTTQTGTDSGPIVDFAISSIFNRPSHGKLENVLSHGYRQGGGRLPCSIPNVAAQFPNKNVQMLKQSPWTEVLALLGSNGDEIMLKLLLDCGLFMAVDARKGVYCQISGQAISSLKPIDTSPEDCPAAFNGSSSPVKRHAVPWQGAAPRAHTKGPKENQQQLSPNAIIFCRQRMLYARPHLNANGGITFGLPNHVLSRFHSAKSLQQTVHVMKYVFPRQFGLHNVFTSHSSYYENPLSKNYSSREEEIARKEGLEAARNQLRKSGFHAAIGERQESIKIPKRLRGKPLELIRQLQNRSRRCCYKKLLQYYCSEELSGPWILGQLSAESNSVLSTSSSRPLVTQPSLAHQDMQRELRPTSYAKGFSKGSGATKPKENLTDHATPAASVSAFCRAVIRNLIPLEFFGVGEQGITHQKMILGHVDRFIRMRRFESLSLHEVCEGIKPESLRQAPSENNISASDLQKRRELFHEFLYYLFDSILLPLIRGSFYVTESQVHRYRLFYFRHDVWRRLTAQPLAHLRASIFEELAPETAEKLLSGKKSIGYGSLRLLPKTTGIRPILNLRRRTLVRSIYAGKNRYHPAQSVNSAIAPVYSMLNYERGRRNDLLGSSMFSVGDMHSRLKKFKESLMSRGWDQRKRLYFVKLDIQSCFDTIPQAKIVRLVEKLVSEENYHWMKYVEMRLASEFDNMWPLRKPQQRRTWSKYLQRVGPVGRPENLADAIANGSVVGRRNTVLVDTIAQKEYNGEGLLDILNEHIRNNLVKIGKKYFRQRKGIPQGSVLSSLLCSLLYAEMERDVLGFLQTDDALLLRLLDDFLLVTLDSGLAMDFLRVMVRGQPDYGISVNPAKSLVNFAAVVDGAQIPRLVDTPLFPYCGSLIDTRTLEIFRDQDRMLEGADSASVALSDSLSIDSTRTPGRSFYRKVLASIKQSMHPMYLDSTHNSLPAVLLNVYKSFVTAAMKMYRYTRSLPGRARPRPEVVVRTIHDATQLGYRLIRGRHGLCRVTHPQLQYLGGAAFQFVLGRKQTQYAGVLRWLDGTLAEARQSVGNSVLLAQAVQKGNRTYREWRF

SEQ ID NO: 8076 - protein, 1157 aa, synthetic construct
PITRSTGRGRIETEQSPPSETTATTQSMWTETTANTVMSLVAPTTESSCATANTEATTKLAEKPGNSKTEAVKQYIAKQNDVPTKQRAGTVKSDRSRNRKEQKIAKAREELARLQVELAAARLATLEAGSDDENSESEYSKSELDERVGTWLETQPTKTENHDRHKETPAGACDKQDFSDLTAAITLAVKAAREPRYTELPFFNGNHQDWLSFRAAYHETMNSFTKTENINRLRRNLKGRAKEAVDGLLITNADPSDVIRSLEARFGRPETIAITELDTLRALPRLTETPRDICIFSSKVTNAVATLRALNCTHYLYNPETTKTMLEKLTPTLRYRYYDFTAVQPKEDPDLIKFEKFMKREAELCSPYAQPEQAGHYSQPAQHNRRTQNVHIVSEKPSRAKCPVCSNTEHTTTDCYIFKKADSNTRWDIAKNKHLCFRCLQYKNKTHNCKPKTCGINDCKYTHNKMLHFDRKIEKTDNSDKETTENINSAWTGKQKQSYLKIIPVQVQGPIGTVDTYALLDDGSTVTLIDEIICKKTGTTGPIDPLHIQAINNIKSTETRSRRVNLTLRGLNSRKEIIQARTVNDLQVTAQKIPKEQIDEYSHLQDISDIITYENAKPGILIGQDNWHMLLASKVRRGNRNQPIASLTPLGWVLHGGRTRTLSHHINYINHASETQEDDKIENLVKQYFAMDALCITPRRPKTDPEEQALRILNSNTVHTTDGRYETALLWKTDNVSLPDNYNNSLKRLINIENKLDHNPELKQKYTEQMEALVAKGYAEPAPKTKTENRTWYLPHFAVVNPPKPEKLRVVHDAAARTRGVALNDMLLKGPNLLQSLPGVIMRFRQHNITATADIKEMFIQVKLRPEDKDALRYLWRKDQRDNKPPEENRMTSLIFGASSSPSTAIYVKNLNAQKHEATHPEAAATIQNRHYVDDYLDIFKGLKDAVLVTTDFRRKHERKPTSKTFWIDSEIVLRWTRTESRSYKPYVAQRLTAIEDSSTINERRWLPTKHNVADDVTRHVPMSYQNEHRWFRWTEFLRQRQNSWPTESASETTEPMGEVNIAAAVPAGASWPRRRHEKWKCQPRNTRMRGKSDSDISRSRQRGAHRRHQNQGWSSTETSTKTTDPAHRRRPSCTEKNATDSHGGSNVQDEIGFFIV

SEQ ID NO: 8077 - protein, 1725 aa, synthetic construct
PAADKRVKMFNLKRVEIMNTLQDFEEFTKSFDATIDAYQIPSRLEQLEELVSEFTELRKAFNETVDDSEAFDIMQKDRREFNKRSHEVRAFLLKNSSHSGASSGLNTTQVNTTISAGTQNHLRLPKVDLPSFDGEITKWLTFKDRFSSMVHDSTEMPEVLKLQYLLSALKGDAAHQFEHMQITADNYYVTWEALLKRYDNSKVLKREYFKAFYSLEKMKTDSTEELARIVNEANRLVRGLERLNEPVDKWDTPLTSLLFYKLDSKTLVAWEQYSVDFKTDEFTNLVEFLEQRVNILKSSAQNICNQYSANSIMVTGRQARRDGRNVALPVQQTNNTFKGYLKCPLCNEQHPLHVCERFERASVINREEIVRKHGLCFNCLRKGHSARECRSTYVCQQCKRKHHSKLCKIGRLSEVEVVPSTSRLTATAQANCSKKTVILSTAQIIILDVNDQPYKVRALLDNGSQLNFITERVAQELRLKRARVSEQIAGVGGAIMRVAGSVVGTIRSLTTEYTTCLEFLILPKIATDLPSETMDVRGWKLPKDVRLADPTFHERGSIDMLIGADTFVEMIKAKKIKLDHELPTLLETELGWIVSGAYKHNNLNQSMACTIVSQGGENDIASLMNTFFNIEEVQDQNLWNVEERECEDHFQATTRRDENGRYVVRLPLKAERELGESKEVALRRLIGLERRFEREPKVKEAYEAFMQEYITLGHMSVRENENSSDGYYMPHHAVFKQDSTTTKCRVVFDGSCKTSNGRSLNDILKVGPTIQQDTTDILLRWRRRAIAVVGDVEKMYRQVWVHEEDRKFQRILWRSHSSEKIKTYELNTITYGTASAPFLAIRTLNQVLEDNKEKYPLAASRINDFYVDDFISGADSENEAKQLCEETKAALAMGGFPLRKWASNCPHILPSETEIDNIQRVIELKSREGAVSTLGLVWNPILDTLGVKISEPETCEIYTKRSIIRTIAKIYDPLGIVDTVKAKAKQFMQRVWSLKKENGDSYGWDEEIPQQMRQEWEVFERQLTHLQEVQVPRCVTIVGARNIQIHGFCDASEEGYGACVYVRSTNGEEIVSRLFVSKSKVTPLATKHTIARLELCAAHLLGKLLVKLKRATEDPYETFCWTDSSTVIYWLKSSPSRWKTFVANRVSQIQNATKEFEWRHVPGIHNPADAVSRGRNPAEVVEDKLWWHGPDWLVKDPKHWPKNIESGNTCETAKEEKQTKTTLTCMVKEESFINKLCERVGSFTKLKRIVAYCHRFFDRKRIHRKSYFELRELKRAEKTIIRLVQNEVYATEYECIKQGQQVVRKSPLRVIRPILDKDNVMRVGGRLSNADIKDEQKHPVIIPGKHRIAELIADKYHKILRHAGAQLMINTMQLRFWIVGARNVAKRTVFNCVKCTRCRPKLIQQPMADLPEQRVRQARPFSISGVDYAGPIMVKGTHRRAVPTKGYISIFVCFVTKAVHIELVSNLTSSAFLAALRRFVARRGHVTELHSDNGTNFRGANNKLRELYKLLNSDTHQDEVVGWCAERDMKWKFTPPAAPHFGGLWEAAVKSMKFHLKRVLGTGHLTFEDLSTLLAEIEACLNSRPITAISEDPNDMEALTPGHFLVGNHLQTVADVDIADVPTNRLNHWRLIQKHMQHIWNRWHREYLSTLQKRAKWNKNAISIEPGRLVILQEDNVAVSKWPMARVVDLHPGKDGVTRVVTLKCANGKEIRRPIHRIAPLPIES

SEQ ID NO: 8078 - protein, 2329 aa, synthetic construct
TLGSSRSPSPGRRRHASEGGTAVPPTPANCGKPTKKRTRGQVSLATRIVGPLKRRINHKVDAAKRILAETEAKMEILLNMPQDQLVSSEDSTYLDALLIRLQTILVALEGMRDLISDKFRDTEMMVDPNRHQHHQEVLDYLEKSSTARFVDHLTHDIQQLETEMRSRNIPITHFDPSLLATTDVETGATTEDDANDEERRDIEATIEDHAQNNGPSDHRVISDLRTPHGSTPSTGTPRLSSPGMVWDNEGLSLHDELQIANLLDPANPQRSPMAPAAPTSSAAAPTQSAAAPPSSATAPMSSAAAYHLHGQHGQQLGAPAHTNGGTTHRQQPLEQRIQTTTKGVLQGKREQLKQGPTETPLLVQHAPTTTGPGTRITPQRVLNAPALQTHQVINSQVGYPSAGAHEYSAFHPLLQYAPPRGEDTLTHRLLAAIEAIATSQSQMQSELISQGRSVHVLTDRMEATEKLIVEPKILNTTVAEETSRPAMPQPTHETAQQQQTTGSEYEYEFDSDDDNNQQPLPPQPRTEIRYVEVKNNGSHDTQNLLKYLGKYDGNSNIDSFLTDFKESVMENENLNQANKFMILKTHLLGKARDCISRDHVTAKALEKTITSLKSVFGKDENKTSLLAQIHAIGFPQSDVREMRRAIAKHSILVEQLVNSGLAANDERTFTPLTSRLPPAIRTRVTQFWGSKGENATFQEIFDYVTTCVDDMARESILALRHLPTAESETEVGPLGIPYSGQINHANATTQNQGNPNGKKTSISLADKPVYKREDHPKTYYDSNTGESLPGYNAPGKQGPVLRLLPRTFPLYEGTTKKTCKACKGSHHTLRCTLSSKDFRQALNASRLCPICTGYHSVEQCRCLMKCILCQGLHHTGGTLSPTSAIPTINPLLTFLPTFSDSAHFEITSTNIYNGRRIDMILGNDLLAWLNANPETKKHILPSGRLVEITDFGHIVHPVPDKTIYQNHTQIEVTSETFMHASALINGPNPEDPNLALTLQVEQQWKLENIGIEAQPLNDHTTTSAKDLQASFENTLRYTPEGILEVAFPLNGNEVRLKDNYEVAVKRLHATVNALKNSKNPNLLKQYDEIFKTQEASGIIESVTPNMKLETKYNYNMPHRAVIKESSNTTKVRVVYDASSHAVGQLSLNDVVHAGANMVIPLFGILIRSRFIKLMIVGDLEKAFHQVQVQPEFRNLTLFLWLTDLNKPITRDNICTKRFVRLPFGMSCSPNLLASTIVHFLVHNPDELNNDILDNLYVDNILIGTNDLALIMNRITRLKQIFSHMKMNIREFVVNHDESMEKIDPKDRVSARTIKLLGMKWNSSPDADTYTIKIADVQTIMHPTKRDVASKMAETFDPLGLISPIQVSMKRLIQKLWSHEVNWKDPIPKHLLDDWQAIQASFIDRTITVPRRLTTDFEYKDIQLLISSDASQDIYAAAAYVYFSYGDDRPPVISLITSKNKIKPSRETNWTIPKLELLGIEIGSNLASSIVKELRCKVTNIRLFTDSSCALYWILSKKNTRVWVANRIDQIHLNQTRMSECGIDTSIHHCPTKDNPADIATRGMSTSELQNSDLWFNGPEFLKQKPEDWPCKIEGTFTCPAEFQAVVFAEILDPKTKKTKKPLMEKAEKPPASETVLHILELPSKFESIISFRYTNSLRKLMLVTYRTLLAISKMRKGKVPTSWILEKFMMAPNLLEKRRVARHYIFLQHYKECAEQGLTFPSSLRYYVAPDGLYRVLKQAKSPTLPAEANEPILVHPKHPLANLLMLETHEINGHLPEQYTRAALRTRYWLPNDSSVARSVISKCIQCKKVHGLPFPYPHSMTLPESRTTPSTPFQNAGLDYMGPVEYSKDDGVSTGKAYVLIYTCFTTRATILRVVSDGSTERFIMALKTIFHQVGVPKMVYSDNAPAFILGGSILNDDISTWEHHSDPLTSFMATQSIHFFRITPVSPWQGGMYERIVGLVKHQILKVCGADRFDYFTLSYIVSSAQAMVNNRPLMQHSRQPDDMIAIRPCDFLNPGVMIETPPTEFTPSAPSGVPEQRVRAHLASLEETIELLWKYWSLGYIINLRQNHHRNVRCADLKPTVGQVVLVNTNLVKRQNWPLGVIVQVNRSERTDEIRTAVVKCKGKLYKRSVCQLIPLEVQSSDMDSLPDTENREDGQECLMDAGMTVQHPSAPPLTIPSAALFDSPDEHYSPELFPRETCPNVTEATENPSPKIQNNTMIPLVPNTSTIQNARLDLHERVGEVDNFENPDLDQVHVDSKDEVEYQDPSTTEELPTAIPGRSRPILPRRVKKPVYYNYFLHTTTAVTSTFSTPECCEMIPSPNYLVL

SEQ ID NO: 8079 - protein, 2036 aa, synthetic construct
EHLGVDPNPLHPIDQYTLLAANKILQRTKRYAEALENLRHYVDDKFQEPVLRGSPLKDVYHEQVQEHLARLQPKSLLTEAKRDITMLERELLNHGFPITTSDPQELVLTPYEYETSEDGTSSSDVDDLASFDGAFDNLRETMGSDHVQIDHQNPNPRVTIPSAILSPPTNGSSHLNYRTVSQPSPLTVHRDSALGSLSRQPSLADELQDERHQHRLSQIRLRALEDTFIARRQADEEAEELGRQQLSQYREMRAARERRLEEMRSQPSPPQAPAPAPRRPHTVHSGAEPTTPDLVPAPALTGYPTPEQLLPQAMLQAMTEMGRLISQLQRDQTQARREQTSFMNECREHLRPPAEGSIGQSAYSPDDEGEEQSQRGSSPPVQPIPDSRSPSGVINFETNAKNLPKFDGTGNFRAFRNGFDTVVLDDPRLPSVTKCNLLRNHLVGNAQQCISHDDDPLVAYQTTMDMLESVYGKGDTQRGLLERFRKLKFHQSNPEQMKLDLTSHQLLVQRLVSTGLSATDDRITMGLIGKLPISFRDKVTEFYTDMDDHPSAIAFYQRIRKHINSFENGLIAASLQPLHVAPVNEIPSHYVKGSVHVVDQKQQPKKGELRHPTSSSGGQKERDTSAFYIDPATGAQLGGHLRPGKRGVHLTLIARTFPLPDETSKKPCAACGGSHSPTRCHLTSQAFREATAQKGLCANCCGKHAIEQCKSHFTAPAFSDQDAHHLDSLEIDHLSISSQRTFDGKRIDMILGNDVLTCLHGDRHTRRHQLPSRRVVDDTRIGYIVHSVPSLILYTSDERKWVFNDQNGLTHSLMLANMVLDHQYVEDPELKLHWSIEQLWKFENLGIEPIPLVDETKKSTQDLLAEFQQNACYTNGVLEVALPFNGNEEKLKNNYAIAYKRLCSLHETLTKGKNLITKYDRVIKDQLLAGIIELVTPEMKPDSPIEYFMPHRAVIKESSNTTKLRVVLDASSPIGKDLSLNDCLHAGTNLLTPLYGILLRSRCYRYIIVADIEKAFHQVRLQVKHRSVTQFLWLADPSQPANADNVVRYRFTRIPFGVASSPFLLGAAIHHFLGRNPHRLNNEIRDNLYVDNCMLGTDDFTKVMPTAMAAKSIFRKMNMNLREFVTNCDGIMQHIRAEDRAESRDIKLLGCMWNSNETVDTYSIKIAVLDIDHPTKREVASKLAETFDPLGLVTPILVQFKRLIQQLWIAGVSWKDRIPIELLPLWRNLQKSFVDKSIHVERRLTFVNEEVIDCQLIIFTDASQDIYAAAAYAHFTYKKWPPVTRLITSKSKIKEVSAANYTIPKLELLGILCGSNLAVTLSKELRLPISSIKLFTDSSCALYWILSAKNTRAWVHNRVQKYHENCARMSECGLSTSLHHVPTKENPADLATRGMSTTELQKSLFWFRGPRFLANPPESWPQKIEGTITCPAEFQDLVYKEIIDTSTEKKKSKPLIEKAIPAAPKATESVLHLTTGPFKSFIPTLNSVCKMFPGKSWDSEIMVEFKNSESALHRRKLVRKLIILHHYRESEALGLKLPADLDYYVDSHGFYLVKKQVTSHALPQEANEPVILFKDHPLATLVMRETHVINGHSSELYTVSAAKTMFWIPHIKVLAKSVVSNCVDCKKVHGLPFRYPNSKTLPEKRTSPSKPFATAGLDYMGPIEYLKDDGVTIGKSYVLVYTCLVTRGAMLRVLPDATTETYLMGLRSIFHCVGSPTDIYSDNAAIFKLGASMLNDDILSGDELSDSLTSYLASQQINFFYITPLSPWQGGVYERIVGLLKHQLYKVSSVEKLSMFSLQYLVSGAQAMINSRPLTPHARSPNDMIALRPIDFQLPGVMLDIPFVHPTGNGRGAEERARAHLAQLETALNRLWQIWTLGYLFHLRKAKHRNKKCTSIKPAVGQVVLIDTNHVNRHKWPLGVILQVHESKRDHEVRTATVKAHGKRCLRSVCQLIPLEVQASEDFTSADPPSEGDLVELEEHDCDDPTSDIPTQAYFEHSRSTARTLLRVSPRVSEIRCLSLGRVTDSPLLVPSVNNN

SEQ ID NO: 8080 - protein, 1606 aa, synthetic construct
FIGSIASNSSLTDCQRFHYLKSYLAGDALALVKHIPVTNDNYREAWERLEQRYNKQSLIIRSFLNSFMSLPSAINSNIGTVRKIADGADEVIRGLRALNCEERDPWLIFILLSKLDSDTRQAWAQCAESEEKGVTINRFLKFLTSRCDTLEAFELTRSTQARRAATTHHADTHPRREEPKCTSCQQNHQLFKCPQFIALDIASRRDFLKSRKLCFNCLSPAHMVGNCTSRHTCRICRRKHHTLVHGSSQPIQNGNNIDTASVDSRDRPAVSHAGSTIGHNQPLAREGHRLGSETPAENNFTHHTLENIPAAGSQTLLPTILADVIDAWGNTTTCRLLLDTGSTITLASESFVQRIGVRRTHARISILGLAANSAGVTRGRAHIKLRSRHSGQTVELVSFILTSLTSSLPAQVIDTSSSTWRQICELPLADPTFCTPGAIDVIVGSDQLWSLYTGDRKHFGNDFPIALNTVFGWILAGSYSAFDDHPTSAVTHHADLDTMVRSFMEMDSIQPNQALLDASDPTERHFAATHKRSTDGVYVVEYPFKEKAPPIDSTLPQAINRFFSLERKFRRYPELKQQYEAFLDDYLQRGHMEKLTSAQVEESPDTCFYLPHHAVIKLDSLTTKCRVVFDGSGKDSSGVSLNDRLHIGPPIQRDLFGVCLRFRQHQYVLCADVEKMFRGIKVFKPHTNFQRIVWRTTENEPLLHFRLLTVTYGLAPSPFLAVRVLKQLADDHGHEYPAAAHALLHDAYVDDIPTGANTFEELMILKDELIALLDKGKFKLRKWSSNSWRLLKSLPEEDRCFEPIQLLNKSAADSPVKVLGIQWNPGKDVLYLNLKGCDATISPTKRELLSQLSRIYDPLGLVAPVTVLLKLIFQESWTSVLQWDDPIPESLRTRWRALVEDLPALTQCQVPRYIASPFRDVQLHGFADASSHAYGAVVYARVAVGCSFQVTLVAAKTRVAPIKPVSIPRLELNAALLLSRLLSIVKTSLTIPLFSTSCWTDSEIVLHWLSAPPRRWNTYVCNRTSEILSDFPRSCWNHVRTEDNPADCASRGLHPSKLLEHRLWWKGPSWLATPTSEWPPSTSKFSVSSSFDVNTEERAIKPTTLHNFPDESIHELLIHKFSTWTRLIRVSSYCHRFIHTLRSHHRNSAPFLTSEELLDAQRRLIRHVQQKSFAREYEQLENRRQLNAKSHLIRFSPFLDDYGVMRVGGRIEQSTLNYNAKHPILIPKDTPLAGLLVRHFHVSYLHTGVDATFTNLRQQYWILGARNLVRKAVFQCKSCFLQRKGTSNQIMGELPIPRVQASRCFQHTGLDYAGPIAIKESKGRTPRIGKAWFSIFVCLTTKALHIEVVSELTTQAFIAAFQRFIARRAKPTDLYSDNGTTFHGGKKTLDDMRRLAIQQAKDEELAGFFANEGISWHFIPPSAPHFGGMWEAGVRSIKLHMKRILGSKALTFEELSTVLTQIEAILNSRPLCPTGDNSLDPLTPAHFLTGSPYTALPEPCRLDMQVNRLERWNQLQAMVQGFWKRWHMEYLTSLHERTKWHLETENLKIDTLVVLKEPNLPPSKWILGRITAVHAGIDNKVRVVTVKTAHGLYKRPIAKIAVLPLC

SEQ ID NO: 8081 - protein, 1239 aa, synthetic construct
VRGAGVRSRGRGRGRVLKGTGESDGHSAKVEQSVGSQPEFVEPGVRNGLGADIAGATGVGAGGAGVGTGVHAVGAEGPGVMGAAAGGAQVPEVGLAGLLRQLLERLPGVVPVETPVAPRVAEVQQRAAVAEEVLSYLRMMEQLQRIDTGYFSGGTSPEEADSWRSRVGRNFGSSRCPAEYRVDLAVHFLEGDAHLWWRSVTARRRQTDMSWADFVAEFKAKYFPQEALDPYAGQGMEDDQAQMRRFLRGLRPDLRVRCRVSQYATKAALVETAAEVEEDFQRQVVGVSPVVQPKKTQQQVTPSKGGKPAQGQKRKWDHPSRAGQGGRARCFSCGSLDHKDAGGQFLAVLGRAKGVDIQIAGESMPADLIISPVELYDVILGMDWLDYYRVHLDWHRGRVFFERPEGRLVYQGVRPISGSLVISAVQAEKMIEKGCEAYLVTISMPESVGQVAVSDIRVVQEFQDVFQSLQGLPPSQSDPFTIELEPGTAPLSKAPYRMAPAEMAELKKQLKDLLGKGFIRPSTSPWGAPVLFVKKKDGSFRLCIDYRELNRVTVKNRYPLPRIDELLDQLRGATCFSKIDLTSGYHQIPIAEADVRKTAFRTRYGHFEFVVMPFGLTNAPAVFMRLMNSVFQEFLDEFVIIFIDDILVYSKSPEEQEVHLRRVMEKLREQKLFAKLSKCSFWQREMGFLGHIVSAEGVSVDPEKIEAIRDWPRPTNATEIRSFLGWAGYYRRFVKGFASMAQPMTKLTGKDVPFVWSQECEEGFVSLKEMLTSTPVLALPEHGQPYMVYTDASRVGLGCVLMQHGKVIAYASRQLMKHEGNYPTHDLEMAAVIFALKIWRSYLYGGKVQVFTDHKSLKYIFTQPELNLRQRRWMELVADYDLEIAYHPGKANVVVDALSRKRVGAALGQSVEVLVSEIGALRLCAVAREPLGLEAVDRADLLTRVRLAQKKDEGLRATKMYRDLKRYYQWVGMKMDVANWVAECDVCQLVKAEHQVLGGMLQSLPIPEWKWDFITMDLVVGLRVSRTKDAIWVIVDRLTKSAHFLAIRKTDGAAVLAKKFVSEIVKLHGVPLNMKEAQDRQRSYADKRRRELEFEVGDRVYLKMAMLRGPNRSISETKLSPRYMGPFKIVERVEPVAYRLELPDVMRAFHKVFHVSMLRKCLHKDDEALAKIPEDLQPNMTLEARPVRVLERRIKELRQKKIPLIKVLWDCDGVTEETWEPEARMKARFKKWFEKQVAA

SEQ ID NO: 8082 - protein, 2057 aa, synthetic construct
VEVLEEEVEVQTLTPSRSEGASGSRNPRHRRRGSRTPPLSDPLRREAGGALLRHPPVNVEPEAPVQRWLDDVANLVTTAQRRLAVSGRSTATGTSRTSTTLSSSARRRARRIATASRRSTAPTSSGASESRRRHDSLYGEQDARVNIERRRDERRATRMGEGASSSGVPRFSSRGGPPLTSTPGGTGYKAFVASLRNVRWPPKFCLNLTEKYNGSINPSEFLQIYTTIIVAAGGDDRVMANYFPMALKAHAVVYAFWNGVRHNRKLEKIASKEPKTTAELFELADKVAQKEEAWAWNSPSTGAAAAAAPETAPRSKRRDRRGKRKPARSDDEGHVLAADGPSRAPRRERATDGKTSYTAPSGKGRSADKWCSVHNTYRHSLADCRSVKNLAERFRKADEEKRQSRREGKALTTPANDQREESKKKAPADDGDDSEGLEFQDILCKVLRDKCGQKSAAKTCGILEFVRDNSRVRSQKAVFLMAEKPPPSPSSASPGSVKEKIQQLDLSEVNEGNVMTITLDKLTPDQKEFEAMMQQARNQFLNSFMQTRKGTVVQKYQVRVVADVPGTGSSKDGEMKQALGGSAQPSNKGATNGSAQENQGDHSQGVHGVQGDGTQGPRGGSLNQDGSASQEFFNNFQDRVDYAVHNAFINQSGVLVNTLSNMMKSIADGSIAKHQAAGPVYLPGGQLVNPRQLMRENPQHSGQVANRLTQDQVATMFLPLQPTVDLVQQQPIQQTPPIQQVVQPIQQQVVHWADLEKQFHSYFYSGVHEMKLYNLTAIKQRHDEPVHEYIQRFREMRNKFISLSLTDAQIADLAFQGMIAPIREKFSSEDFESLPHLTQKVTLHEQRFAEARRNSRKVNHVCSYMCGSDDEDDDSEIAAAEWVRSKKVMPCQWVKNSGKEERYDFDITKADKIFDLLLWEMQIQLPAGHTIPSAEELGKKRYCKWHNSGSHTTNDGKVFRQQIQSAIEGGKIKFDDSKKPMKVDGNPFPVNMVHTAGQTADGGRARGFQMNSAKIINKYQRKYNKQQEKHYEEGDDGFDPHWGCEFFRFCWNEGMRLPYIEDYPGCEQAVFKKPEGAENRHLKPLYINDYVNGKPMSKMMVDGGAALNLMLYATFRKLGRNAEDLIKTNMVLKDFGGNPSETKGVLNVELTVGGKTIPTTFFVIDGKGSYSLLLGRDWVHANCCIPSTMHQCLIQWQGDKIEIVPADSQLKMENPSYYFEGIVEGSNVYTKDTVDDLDDKQGQGFMSADDLEDIDIGPGDRPRPTFISQNLSSEFRTKLIELLKEFRDCFAWQYYEMPGLSRSIVEHRLPTEPGVRPHQQPPRRCKADMLEPVKAEIKCLYDASFIRRCRYAEWVSSIVPVIKKNGKERVCIDFRDLNKATPKDEYPMPVADQLVDAASGYKILSFMDGNVGYNQIFMAEEDIHKTAFRCPSAIGLFEWVVMTFGLKSAGATYQRAMNYIYHDLISWLVEVYIDDVVVKSKEIEDHIADLRKVFERTRKYGLKMNPTKCAFGVSAGQFLGFLVHERGIEITQRSINVIKMIKPPEDKTELQEMIGKINFVRRFISNLSGRLEPFTPLLRLKADQQSTWGAEQQKALDNIKEYLSSPPVLIPPQKGIPFWLYLSAGDKSIGSVFIQKLEGKERADVVKYMLSAPILKGRIGKWIFSLTEFDLWYESQKAIKGQAIANFIVDHRDDSIGLVEVVLWTLFFDGSVCTHGCGIGLVIISPRGACFEFAYTIKPYATNNQAEYEAVLKGLQLLKEVQADTIEIMGDSLLVISQLAGEYECMNDTLIVYNDKCQELMKEFRLVTLKHFVQEHIIYRFGIPQTVTTDQGSIFVSDEFVQFADSMGIKLLNSSPYYTQANGQAEASNKSLIKLIKRKISDYPRQWHTRLAEALWSYRMACHGSTQVPPYKLVYGHEAVLPWEVRIDSRRTELQNDLTADEYYNLMADEREDLVQSRLRALAKVTKDKERVAWHYNKKVVPKDFSEGELVWKLILSIGTRDSKFSKWSPNWEGPFQIHKVVSKGAYMLQGLDGEVYGRALNGKYLKKYYPSVWVNA

SEQ ID NO: 8083 - protein, 2875 aa, synthetic construct
LHDDLQRGPSIIKNTPPPFVIQFGSLPPVTFFEYGSKVYMQQAQDVTQFQEAQSKKQRKRASAKAKKERRTLMLEARTLLKESVVAEIKGDIQAAQKLRVKASNRRSITASLRAPDPVATPKLPTPTVQHTEVELLEALEAVSDNLRRHISHTRRANSPHPLRNYRRKYRKVQRLHQLVSSRIAQSSLLEEDWSLDTSVLIKKVFKFPSILEPPYDLFPDEWACEPTKIKEKVRCAIMKEYWKRRDREHLVLPGSTIFVDYNTYTPRQQSTWESCLHLSAVGGSSDYNNNRFAVLRSEAPAPRSEDLRQELRELQDRMAQLGRRLQDHEAPRSSSTQAGGRSRRYQPSYHPQHDRRTLAPRRTLPSTQVMHQRQTALPPRWNRWSRHQDYPTSSRLAQEWRVREAPSSQVPPHVPSSPRREVYTQRRRETNAPNPATRQVAPPLLPTPSIPPRRQHAPTENQRKRERRRNNRYALYRELEDLVLKHTQVRVRPDGEVHQEDERIVFRISPSLERDARYNYLIARLTPKPRRTLDVADKNREQALTQPCPVTILQRGKGPVQATLGISLSTSARQSKENQSTPMEGVEQTPVEQVDKASRQEEAIINPMVDVLPQQESSSVPPARVEQVAGSKNIEDPKESIVMCSALAAHYETKPNAAWVPPPVTHDFTYPSDEEIVPNPRANFSKTFLPQLDQVASRPGANTRMKAIAIKNVEATPSQARKDLEDHVEVEDLDELESTSSSSLEVNLNLPRYNELNPSLPSDGEGYPNNFDSAPAHVTAEGDPRQHARQHAPRGENPSIGNWATMKEVFKKHFVAMKKDFSIVELSQVRQWRDEAIDDYVIRFRNSFVCLAREMHLEDAIEMCVHGMQQHWSLEVSRREPKTFSALSSAVAATKLEFEKSPQIMELYKNASAFDPTKRFNATKPSGSGNKPKVPTEANSTKVFSTAPQGQVPMIGAKNEQVGGRQRSTLQDLLKKQYIFRRELVKDMFNQLMEHRALNLPEPRRPDQVTMTDNPLYCPYHRYIGHAIEDCIAFKEWLQRAVNEKRINLDADAINPDYHAVNMVSVEPFPQKQREGRRATSWAPLAQVEDQIAKIMLTKAPATHVEASHGDNNRAWSIVRWKPQPMSFPPRRPQMKLSPHTHPTSRRWLDPSRRRPPPRFVPFSEGDESFPRRGRELPTLAQFLPKGWEQSSTSTREAKGVNNSIPTPDIAPCNVILTYNDSTSTGSDETFTGREREIFHAELDPEKTKVEEVNISLRGGKTLPDPHKSKVPNVDKPAKKASPPGEAPEAPETKTGSKEKPAVDYKVLAHLKRIPALLSVYDALMMVPDLREALIKALQAPEVYEVDMAKHRLYDNPLFVNEITFADEDNIIKGGDHNRPLYIEGNIGSAHLRRILIDLGSAVNILPVRSLTRAGFTTKDLEPIDVVICGFDNQGKPTLGAITIKIQMSTFSFKVRFFVIEANTSYSALLGRPWIHKYRVVPSTLHQCLKFLDGNGVQQRITSNFSPYTIQESYHADAKYYFPVEENKQQLGRTTPAADIIVEPGTETTPEHVYPIYYTNIAQSKTLYLNTDHLGGNFSRKRETAQKQRRCANYHHLTGKTESKQGSRACTTGSGQEESCRDRGGKSGCSVHAAPSPLHFSFYPAREEACTTMKAEPRMARLLEKAGINLQRNNRLPPPPAVCEDWWAQAEEFIKRRCKEQPKYGLGYINVDEPDDEDEVFEDDIFHCCTISTTTRGDALLQQHPFEVAAVGVEEELDVAGALKQLDDGGQPTIDELVEMNLGTEDDPRPIFVSGMLTEEEREDYRSFLMEFRDCFAWTYKEMPGLDSRVATHKLAIDPQFRPVKQPPRRLRPEFQDQVIAEVDRLINVGFIKEIQYPRWLANIVPVEKKNGQVRVCVDFRDLNRACPKDDFPLPITEMVVDSTTGYGALSGYNQIKMDLLDAFDTAFRTPKGNFYYTVMPFGLKNAGATYQRAMQFVLDDLIHHSVECYVDDMVVKTKDHEHHQEDLRIVFERLRRHQLKMNPLKCAFAVQSGVFLGFVIRHRGIEIEPKKIKAILNMPPPQELKDLRKLQGKLAYIRRFISNLSGRIQPFSKLMKKGTPFVWDEECQNGFDSIKRYLLNPPVLAAPVKGRPLILYIATQPASIGALLAQHNDEGKEVACYYLSRTMVGAEQNYSPIEKLCLALIFALKKLRHYMLAHQIQLIARADPIRYVLSQPVLTGRLGKWALLMMEYDITFVPQKAIKGQALAEFLATHPMPDDSPLIANLPDEEIFTAELQEQWELYFDGASRKDINPDGTPRRRAGAGLVFKTPQGGVIYHSFSLLKEECSNNEAEYEALIFGLLLALSMEVRSLRAHGDSRLIIRQINNIYEVRKPELVPYYTVARRLMDKFEHIEVIHVPRSKNAPADALAKLAAALVFQGDNPAQIVVEERWLLPAVLELIPEEVNIIITNSAEEEDWRQPFLDYFKHGSLPEDPVERRQLQRRLPSYIYKAGVLYKRSYGQEVLLRCVDRSEANRVLQEVHHGVCGGHQSGPKMYHSIRLVGYYWPGIMADCLKTAKTCHGCQIHDNFKHQPPAPLHPTVPSWPFDAWGIDVIGLINPPSSRGHRFILTATDYFSKWAEAVPLREVKSSDVINFLERHIIYRFGVPHRITSDNAKAFKSQKIYRFMEKYKIKWNYSTGYYPQANGMAEAFNKTLGKILKKTVDKHRRDWHDRLYEALWAYRVTVRTPTQATPYSLVYGNEAVLPLEIQLPSLRVAIHDELTKDEQIRLRFQELDAVEEERLGALQNLELYRQNMVRAYDKLVKQRVFRKGELVLVLRRPIVVTHKMKGKFEPKWEGPYVIEQAYDGGAYQLIDHQGSQPMPPINGRFLKKYFV

SEQ ID NO: 8084 - protein, 1366 aa, synthetic construct
TPVDSMSKDPPAEAENGISTTSEPEKDPNAAKSCPSDKKHEPTRTTSEVTRTWCPIHKTRRHILQTCSVFLDVQAEIRASKERGIQRTSPPRDVYCPIHKAKTHDLSSCKVHLSAMRTSPPKVQQSQIYPRDADKEQGATTISDRFVRVIDIDPHEPSILHLLEDQASSSTSTPCDVYAIDGTSTSRDGDAETADQSVTPTPAQHIRILNAILSESPFDPVLNADLDQWTERLRESVANLSNAFAEAAARAPLEQPPTGGANGEQPEERTPHRQATPPPRGNSDLRDHLNGRREARRTQDNENRTIEKYDGSTDPEEFLQVYSRVLYVAGADDNALANYLPTAMKESAQSWLVHLPPYSISSWADLWQQFVTNFQGTYKRHAIEDDLHTLTNMIPEITDASVIRALKSGVRDHYTTQELATRRITTAHKLFEIVDRCAHTDDALRHKNDKPRTGGEKKPAKDARLSQARKRVAGVGNGRLKRSPRPECYTIHKSDKHPLETCFVFKKALTKQLALEKGKRGAASKMKWSEQKIEFSEADHLKTAVTPGRYPIVVEPTIQNIKVARVLIDDGSSINLLFASTLDAMGIPRKQITFDVAEFDAAYNAIIGRTALTKFIAASHYAYQVLKMPGPKGTITIQGNEKLAVQCDKRSLDMVEHTPNTPATAEPPKKPFDMPGVPREVIKHKLIVRPNAKPVKQKLRRFAPDRKQAIREAIRKWRMCIDFTGLNKACPKDHFPLPRIDQLVDSTAGFQGALNDQLGHNVEAYVDDIVVKKKTSDSLIDDLRETFDNLRRYRLMLNPKKCTFGVPSGKLLGSLVSERGIEVNPEKIVGHREREIAHKTQGSPEANWMHGGTKQEAEDAFIALKHYLSNPHVLVAPQPNEELFLYIAATPYSPTVTAVSSFPLGEVVRNKDVVGRIAKWVLELSQFNVHFVPQIAIKSQVLADFVADWTMPENKSDSQTDSETWTMAFDGALNSQGPGAGSILTSPSGDQFKHEIHLNFRATNNTAEYEGLLAGIRAAAALGVKRLIVKGDSELVANQVHKDYKCSSPELSKYLAEVRKLEKRFDGIEVRDIYCKDNIEPDDLAWRASRREPLEPSTFLDVLTKPSVKEANNEEAEKITRQAKIYCMIGNDLYKKASNGVLLKCLWSDDGKHLLLDIHEGICESHAGGRKLRCEACQFHSKHTKLPAQVLQTIPLTWPFSCWGLDILGPFPRGQGGYKFLFVAIDKFTKWTEVTPTGEIKANNAINFIKGIFCKYGLPHRIITDNCSQFISADFQDYCIKLGVKICFASVSHPQSNGQVERENGIVLQGIETRVYDRLMSYDKKWIEELPSILWAVCTTPTTSNKETSFFLVYGSEAMLPTELRH

SEQ ID NO: 8085 - protein, 1225 aa, synthetic construct
TEKLPPSPGTGVKPPVNKTEAKNPSAEVDPSNIVPITLDRLTAEQRDELEQMMSNVKNKFMDSFQETRRETIPMRSARVHLKVTKVLQLAQVTKVTFLKMWADLEKQLHSYFYSGIHEMKLSDLTAIKQRHDESVQDYIQRFREMRNRCYSLSLTDSQLADLAFQVLIAPIKEKFSAQDFESLSHLAQKVTLHEQRFAEAKKNFKKINHVYPYCDSDDEDDDSEVAAAEWVKRKKVIPCQWVKSSGKEERFDFDITKADKIFDILLREKQIQLPAGHIIPSAEELGKRRYCKWHNSGSHSTNDCKVFRQQIQAAIEGGKIKFDDSKKPMKVDGNPFLVNMVHTSERAADGGSNRKFQVNSARIISKYQRKYDRQQGEYHEEDGGFDPHWDCEFFRFCWNEGMRLPSIEDCPGCSNAGNSSRSYSRAEFEAKQADVDDVEEASAKVVLSPEQAIFEKPEGIENRHLKPLYINGFANGKPMSKMMVDGGAAVNLMPYATFRKLGRNPNDLIKTNMVLKDFGGNPSETKGVLNVELTVGSPGDRPRPTFISKNLSSEFRTKLIELLKEYRDCFAWEYYEMPGLSRSVVEHRLPIKPGIRPYQQPPRRCKADMLEVVKAEVKHLYDAGFIHPCRYAEWVSNIVPVIKKNGKVRVYIDDEVVISKEIEDHIADLRKVFERTRKYGLKMNPTKCAFGKLEPFTPLLRLKADQKFTWGAEQQKALDNIKKYLSSPPVLIPPQKGISFRLYLSAGDKSIGSVLIQELERKERAIFYLSRRLLDAETRYSPVEKLCLCLYFSCTKLRHYLLSNECTVICKADVVKYMLSAPILKGRVGKWIFALTEFDLRYESPKTIKGQAIADFIMDHRDDSIGSVDIVPWTLFFDGSVCTHGCGIGLVIISPRGASFEFAYTIKPYVTNNQAEYEAVLKGLQLLKEVEADAIEIMGDSLLVISQLAGEYECKNDTLMVYNEKCRELMSGFRLVTLKHVSREQNVEANDLAQGASGYKPMLKDVEIEVATITADDWRYVVFQYLQNPSQSASRKLCYKALKYTLLDDELYYRTIHGVLLKYLSADQAMVVMGEIPPYKLVYGHEAVLPWEVRIGSRRTYLQDELTTDEYYNLMADEREDLVQSRLRALAKVTKDKERVARHYNKKVVPKSFSEGELVWKLILPIGTRDNKFGKWSPNWEGPFQIHKVVSKGAYMLKGLVGKVYGRALNGKYLKKYYPNVWVNL

SEQ ID NO: 8086 - protein, 1534 aa, synthetic construct
AAEEGAEPSASVAEDGEAQAPSQPPSAPAPSQPSSAPATSVQVPNTADVAKAATAARALQTKAEILSTNQLVVPQAAPSQPAAPTALAVVQAQISLDPEAQAEADMEAMRQNMTRLQDMLRQMQEQQQAYEVTRWTKATSAPILQYSAGYAPPQVRPQVVTQPSPPLAAQPPVYFAGQHQPSGQATQTVAEGASALQAQLQVFHRQLNQPHYISSTTPSAHPVPTIRQQVPTRGFGTNQAPIQAAMTWLQPIFDPSMAAQQVPPVGAGQPNAMAQLHAQAAISPFATPYPQQGAVNRAGGEKGLPLSGGIKTRPIPPQFKFPPVPRYSGETDPKEFLSIYESAIEAAHGDENTKAKVIHLALDGIARSWYFNLPANSIYSWEQLRDVFVLNFRGTYEEPKTQQHLLGIRQRPGESIREYMRRFSQARCQVQDIIEASVINAASAGLLEGELTRKIANKEPQTLEHLLRIIDGFARGEEDSKRRQAIQAEYDKASVATAQAQAQVQIAEPPPLSVRQSQSAIQGQPPRQGQAPMTWRKFRTDRAGKAVMAVEEVQTLRKEFDALQASNHQQPARKKVRKDLYYTFHGRSSHTTEQCRNIRQRGNAQDPRLQQGTTVEAPREAVQEQTPPVEQRQDVQQRMGLPTQALTPAPTSLRGFGGEAVQVLGQTLLLIAFSSVENRREEQILFDVVNIPYNYNAIFGRATLNKFKAISHHNYLKLKMPGPKGVIVVKGLQPSAASKRDLAIINRAVHNVETEPHERPKHTPKPTPHGKVAKVQIDDFDPTKLVSLRSPRLKLRKMSADRQEAAKAEIHMNPLNIPKTSFVTPFGTFCQLRMPFGLRNAGATFARLVYKVLGKQLGRNVKAYVDDIVVKIHKAFDHANNLQETFDSLRAAGIKLNPEKCVFSVRAGKLLGFLVSERGIEANPEKIDAIQQMKPPSSVHEVQKLAGRIAALSRFLSKAAERGLPFFKTLRGAGKFNWTPECQAAFDKLKQYLQSPPVLISPPLGSELLLYLAASPVAVSAALVQETESGQKPVYFVSEALQGAKTRYIEMEKLAYALVMASRKLKHYFQAHKVIVPSQYPLGEILRGKEVTGRLSKWAAELSPFDLHFVARSAIKSQVLADTTEYEAILLGLRKAKALGVRRLLIRTDSKLVAGHVDQSFEAKEEGMKRYLEAVRSMEKCFTGIMVEHLPRDQNEEADALAKSAACGGPHSPGIFFEVLHTPSVPMDSSEVMVIDQEKLGEDPYDWRTPFVKHLETGWLPVDEAEAKRLQLRATKYKMVSGQLYRSGVLQPLLRCISFAKGEEMAKEIHQGLCGAHQAARTVASKGLDIIGPFPVARNGYKFAIVAVEYFSRWIEAEPLGAITSAAVQKFVWKNIVCRFGVPKEFITDNGKQFDSDKFREMCEGLNLEIRFVSVAHPQSNGAAERANGKILEALKKRLEGAAKGKWPEELLSVLWALRTTPTRPTKFSPFMLLYGDEAMTPAELGANSPRVMFSEGEEGREESLELLEGVRVEALEHMHKYTTSTSATYNKKV

SEQ ID NO: 8087 - protein, 1253 aa, synthetic construct
KEQFGLRPKDAGNLYRQPYPEWFERVPLPNRFKVPDFSKFSGQDSTSTYEHISQFLAQCGEASAVDALRGMIAPIMEKFSSEDFESLSHLTQKVTLHEQWFAEARRNSRKVNHVCPYLCGSDDEDDDSEIAVAEWVRSKKVVPCQWVKNSGKEERYEFDITKADKIFDLLLREKQIQLLAGHTIPSVEELGKKRYCKWHNSGSHTTNDCKVFRQQIQAAIEGGKIKFDDSKRPMKVDGNPFPVNMVHTTGRIADGVRTRGFQVNSAKIINKYQRKYDKQQEKHYEEDDDGFDPHWGVSLLRIRKKVSKIEKPERFQEVEQEINYRLKRTKPKQEWRVKKQAPVADEAAVDAAKRLAKGKSVVIASVNMVFTLLAEFGVKQADVDEVEEESAKLFLSPEQAVFEKPEGTENRHLKPLYINGYVNGKPMSKMMVDGGAAVNLMPYATFRKLGRNTEDLIKTNMVLKDFSGNPSDIKGVLNVELTLGNKTIPTSFFVIDGKGSYSFLLGRDWIHANCCIPSTMHQCLIQWQADKIEIVPADRSVNDCLSGKFWDGDFLKVFDFDIQPVEDGEPKLLFWGRRVYTKDTIDDLDDKQRQGFMSADDLEEIDIGPGDRPKPTFISKNLSAEFRTKLIELLKEFRDCFAWEYYEMPGLSRSIVEHRLPIKPGVRPHQQPPRRRKADMLEPVKAEIKRLYDAGYNQIFMAEEDIHKTAFRCPGAIGLFEWVVMTFGLKSAGAMYQRAMNYIYHDSIGWLVEVYIDDVVVKSKEIGDHIANLRKFLRFLVHERGIEVTQRSVNAIKKIQPPENKTKLQEMIGKINFVRRFISNLLGRLRHYLLSNECTVICKADVVKYMLSAPILKGRVGKWIFSLTESDLRYESPKAIKGQAVADFIVEHHDDSIGSVEIVLWTFFFDGSVCTHGYGIGLVIISPRGACFEFAYTIKPYATNNQAEYEADLKGLQLLNQLAGEYECKNDTLMIYNEKCQELLKEFRLVTLRHVSREQNTEANDLAQGASGYKPMIKNVEVEVATITADDWRYDVHQYLQDPSQSASRKLRYKALKYTLFDDELYYRMVDGVLLKCLSADQAKVAIGEVHEGICGTHQSAHKMKWLLRRAGYFWPTMLEDCFRYYKGCQYCQKFGAIQRAPVSAMNPIIKPWPFRGWGIDMIGIINPPSSKGHKFMLVATDYFTKWVEAIPLKKADSGDAIQFVQEHIIYRFGIPQTMTTDQGSIFVSDEFVQFADSMGIKLLNSSPYLCTS

SEQ ID NO: 8088 - protein, 2301 aa, synthetic construct
DYLEQENRVLREEMTAMQTRMDEMAELIKTMAEAQTQAQAQIQAQAQALAQAQTQAQTLTEAQARSQAPPPPPPVRTQAEASSSWTLCADTPTQSAPQRSTPWFPPFTAGEIFRPITCEAQMPTHQYTAQTPLPAMRVTPATMTYSAPVIHTIPQTEEPIFHSGNAEAYEEVSDLRAKYDELRRDMKALHEKGKFGKTAYDLCLVPSVQVPHKFKIPDFEKYKGSSCPEEHLKMYVRRMPAYAQDDQILIYYFQESLTGPASKWYTNLDKTRVQTFRDLCEAFVEQYSYNVDMTPDRSDLQAMTQGDKETFKEYAQRWRDTAAQVSPRIEEKEMTKLFLKTLNHFYYKKMVGSTPKSFAEMVGMGVQLEEGVREGRLVKNTTPASGTKKTGNHFPRKKEQEVGMVTHGGPQQTYPAYQHIAAITPTSHPFQQTNNHPQIPQYPQMPQYPQIPQYPQFPQNPSPQNTQQQNIQQQNFQQQPYQQYPYQQYPQQYFQQQPYQQRPQQPRPPRMPINPIPVTYAELLPGLLKKNLVQNRTAPPIPEKLPSWYRLDQTCDFHEGGRCHNIETCYAFKSAVQRLINDGKITFTDSAPNVQTNPLPNHGAATVNMIENCQKTRPILNVQHIRTPLVPLHAKLCKVDLFEHDHDLCEICLMNSGGCQKVRNDIQGLLDRGELVVERKSDDVCVITPEGPLEVFYDSRKSTITPLVICLPGPLPYASEKAIPYKYNATMIEEGREVPIPPLSSVDNIVEDSRVLRNGRVVPIVFPKRIDATTNKELRTKDADVAKEVDQPKEAGTSAEFDEILKLIKKSEYKVVDQLMQTPSKISIMSLLLNSEAHKDALMKVLEQAFVDYDVTVGQFGGIVGNITACNNLSFSDEELPAEGRNHNRALHISVNCKTDALSNVLVDTGSSLNVLSKTTYTQLAYQGAPLRRSGVMVKAFDGSRKDVLGEVILPITVGPQVFQVNFQVMDIQASYSCLLGRPWIHEAGAVTSTLHQKLKFVKNGKLVTVNGEEALLVSHLSSFSFIGADDVEGTPFQGFTIEDKNAKRNEASISSLRDAQKVIQAGGSTSWGKLIELPENKHREGLGFFPSTGLSTAKKGTFHSSGFIHAIIEDDPESVPRGFITPGVSSHNWVAVDVPFVAHLSKLEIDEPVEQHNPMISPNFEFPVYKAEEEENEEIPDEISRLLEQERKTIQPYGDELEVINLGTKEDKKEIKVGASLETSVKKQVIELLKEYVDVFAWSYRDMPGLDTDIVVHHLPLKPECPPVKQKLRRTRPDMALKIKEEVQKQIDAGFLVTSNYPQWLANIVPVPKKDGKVRMCVDYRDLNKASPKDDFPLPHIDVLVDSTAKSKVFSFMDGFFGYNQIKMAPEDREKTSFITPWGTFCYKVMPFGLINAGATYQRGMTTLFHDMIHKEIEVYVDDMIVKSITEEDHVKYLQKMFQRLRKYKLRLNPNKCTFGVRSGKLLGFIVSQKGIEVDPDKVKAIREMPAPRTEKEVRGFLGRLNYISRFISHMTATCGPIFKLLRKEQGIVWTEDCQKAFDNIKKYLLEPPILIPPIEGRPLIMYLTVLENSMGCVLGQQDETGRKEHAIYYLSKKFTECESRYSILEKTCCALAWAAKRLRHYMINHTTWLVSKMDPIKYIFEKPALTGRIARWQMLLSEYDIEYRSQKAIKGSILADHLAHQPLEDYRPIKFDFPDEEIMYLKMKDCDEPLFGEGPDPDSVWGLIFDGAVNVYGNGIGAVLLTPKGTHIPFTARLRFDCTNNIAEYEACIMGIEEAIDLRIKNIEIYGDSALVINQIKGKWETLHAGLIPYRDYARRLLTFFNKVELHHIPRDENQMADALATLSSMIKVNHHNDVPLISVKFLDRPAYVFAAEAVFDDKPWFHDIKVFLQTREYPPGASNKDKKTLRRLSSNFFLNGDILYKRNFDTVLLRCVDKYEADLLIHEIHEGSFGIHPNGHTMAKKILRAGYYWMTMESDCYKHTRKCHKCQIYADKIHMPPTTLNLLSSPWPFSMWGIDMIGRIEPKASNGHRFILVAIDYFTKWVEAASYANVTKQVVVKFIKNHIIYRYGIPNRIITDNGTNLNNKMMKELCDDFKIEHHNSSPYRPQMNGAVEAANKNIKRIVQKMVVTYKDWHEMLPFALHGYRTSVRTSTGATPFSLVYGMEAVLPVEVEIPSLRVLMEADLSEAEWVQNRYDQLNLIEEKRMTALCHGQLYQKRMKQAFDKKVRPREFKEGDLVLKKIFSFQPDSRGKWAPNYEGPYVVKRAFSGGAMTLQTMDGEELPRPVNIDAVKKYFV

SEQ ID NO: 8089 - protein, 1799 aa, synthetic construct
TKQSSSKTEVEPTNVIPITLDDFEGEDCKSMKEYIKEITQEALMRACTRTRQGMIIKPGPRPKLTLDLVSNEEVTQSIQQQVASTIDSSMIIFKNKLDATIEGRFDEFLRTKFGPLMADFMLKDKASTSASQAPIDQTSRRTDGAAQTAGPTGPDGRSDRILPRRLDRDSGRSDRASGRRSDRALDRTFDSPVSTVATNSQVPPHVPNAYNDVARGYPPDTRQGQYNHITPQTQPIRPPNPPPNQHRPDNMEEIISGIIRDKFGIEARNRAKVYQKPYPDYYDNVPFPRGYRVPEFTKFSGEDSRTTWEHRFRDVRNRCYSLNITDRDLAGLTFNGLIAPLRERLDGQQFLDVSQLMQKALAQESRVKDNKKFVRPYEKKPNVNLIDYPEASDSEGEGDHDMYVAEWSWTNKNKPFVCSNLMPTPRKDWQSEVQSAIDEGRLKFTDSSKMKLDHDPFPVNTINFNDKKMLIRPEQAESTKGKGVVIGEPRPKMIVPKKPENRANEEKREGKRITVEARTSEVITIKVGSHDVPIPSGDEVGESSSNKPKAGTSSSQSAGLTRPSGRSDRSHTAGLTGPSGQSDRRPNDGPTDAPGRSDSRHHVGPTGAPGRSDRWSKSGLTGLQHRFDGRFTKGSAGTSSSSSRPNRGHYLPPGTEPKPRRFNELRPPPVWRRKSVEKEEPIVVEKKEKQSVDKDESSLKEDMDINMVCMLPMEFCAVDEAEVAQFSLGPKDAVFEKPDESNRHMKPLYLKGHIDGKPVSRMLVDGGAAVNLMLYSLFKKMGRGVDELKKTNMILNGFNDEPTEAKGIFSVELTVGNKTLPTAFFIVDVQDFDKVEKLGQGFTSADPLKEVDIGNGTKPRPTFVNKNMRADYKVKIIKLLKEYVDCFAWKYHEMPGLSRELVEHRLPIKPGFRPYKQPPRHFNPLLYDRVKEEIDRLLKAGFIRPCRYAEWVSSIVSVEKKGSGKIRVCIDFRDLNKATPKDEYPMPIADMMINDASGHKNAGATYQRAMNLIFHDLLGIILEIYIDDIVVKSDGMEGHIADLRLAFERMRQYGLKMNPLKCAFGVSAGRFLGFMVHERGVEIYPKKIEKIRDFKAPICKKEVQKLLGMVNYLRRFIFNLAGKIDAFVPILHLKKEADFTWGAKQQEAFEELKRYLSTPPVVRAPKAGKPIRLYIASEDKVIGAVLTQEEDGKVYIITYLSRHLLDAETRPILSGRIGKWAYALIKYDLAYEPLKSMRGQIACDFIVDHHVDIAYEEDVCLVEVIPWKIYFDGSSCKEGQGIGVVLFSPNGMCYEASVRLEYYCTNNQAEYNALLFDLQVMEMVGAKYVEAFGDSELVVQQVAEVYKCLDGSLNRYLDSCLDIIANFDNFAIRHIARHDNSRANDLAQQASGYDVKKGLFLLFEEPMLDFKFLCEIGEIGDQGRSDRRCAAGLTGDQVQSDRPHAADLTGDPGRSDRPCMAGLTGSGQGAGGHATINLEAKLIVNSDICAQETEEDWRIPLIRYLKDPTLKVDWKIRRQAFKYTLLDEDLYRQNIDDVLLKCLDEDQSKVAMGEGHRFVLVAMDYFTKWAEVVPLKNMTHTEIIDFILKHIIHRFGIPQTLTMDQAKSSNKTLLKLIKKKIEEHPKRWHEVLSEALWAHRISKHGATKVTPFELVYGQEAILPVEVNLGSLRYIKQDDLSGEDYKTLMGDNLDEVIDKRLKALEEIENEKKRVAKAYNKRVKVKLFQVGDLVWKTILSLGTRFREFDSRYSSKRQRGMCLHPNLASKVKIGKVAKIWKSTGFLRVGRSDRRVLGGQTAG

SEQ ID NO: 8090 - protein, 413 aa, synthetic construct
QHYHDTIQQENQLIPSFFTYIAKLKQDLDSLPDEFFHKRRSKVKDYPQTKKTPVKPLPKISEEEHKQQIDEELCLRCGQPGHKTKFCTNSSNKSQQTDKKNKNQAKTRTAKPMQDPGQTLERQGVNPIKKASRCKQAALLDSGTTVNSISYKLASQLDWDQPETPMEVIEMLNRAEADWYSIYKTQLTITDSMGTIKMKKYYCPSRQRFYKNDILIFSASEKEHEKHVRLVMEYLREYQLFAKLAKCAFKRQTISYLGYIIDNEGIKMDPKQIQVITEWLLLQSFHNIQIFLGFANFYQRFIQKYSVIVALLTDLLKSSEKRRKKEPFLLTPTTRKVFCELQAVFFREPVIQHYNPECRIHLETDTSEHAAEMVQGRPGGTKIIDVLNLLLEAQGDDSSVQARFTKTESQQSE

SEQ ID NO: 8091 - protein, 677 aa, synthetic construct
NSSDSTNNTSPHSSATCSTAPTTSSVPAVTFLPTPQSPDFSHEHARYLNWLRSIYPVHTIPIFTGDAVLVSQNAQLAHDWLIAVENFLCTFPVPHHARPHLLGSRLFGSAGLWWRQSMAKNILSNWHEFKSNFASYWCPEFNSQTESHFFHKVRQGVAETAAEFAQRRLQVGKMAGVPKTYHVSLRRSRKLIYDPDNQVYLCMVKPRRDSEAVSREELELISKNKDIVVNTPPDLAKSPFCVNYGLCRHETEFVEYHVNRMLEEGLVDPTQSVYGAPVLIIISKDGEFRMCTDHRILDDRSINDRFWLPKTDEILSQIGHNGVFSKLHLFSGYYQAFKKPTGLSNNVISIFPLDLREDRDNHLGLSEVLDQLGGCLSGVAFDEFDNLIVCSKDRETHTADLDNVLRVLRQRHIYVNKYQSDMFKSSLELLGHIVDKQTCRPDPLKVCTIVNWRAPLNTTDTASFLHLAGYYRRYIPDFALVARPMALLCGGNKPFDWTEKCQSAFDLIKTTLVRAAPVRLETLRGAYRLSTEIFETCFSVVLEQQDASGMFHVVDRKSARFHGLELRFTEYEKNVKAIVYALRKWRIGHGLFLIQTRFPLSRDIILNPAYLKGSSLSRWLHFIHAHQFEVADISQNKMQKNGTDGLKRGVEVDGKMGVDNVVDSGANSLAKRVCVEN

SEQ ID NO: 8092 - protein, 981 aa, synthetic construct
HLPSATLDANPRMFKPRLYRVSPCDRQAIDLVFDELTWQGHLTTAPPGTPCSWPVFVVYHEGKPCPVVDLRQLNDVVDPDVYPLPTPDKLREKLAGAKYITMFDLCKAFYQMLLHPDDHWKATVLTHCGQETLSCTIMGQSHSVSFLQQVLTEAFKVDRLSTMAFVYVDDFGVHSNSLDEHMDHIHTVLGVIQTLGLTLAQDKAHVACKEVPLLGHLVSRQGTRTMPSKCEAIKSIPYPAMLNQLEHMVGFFSYYKNYVPHFSALIAPLQHLKTTLLRLSPKTRQARKCYCTGMSVPDDTSTRQSLTKLKTILQDWALQFPDYSQPFLLYVDTSQQHGFALALHQNHQDSGIGDSIQCIDAIHLNSTDASAKAPVWFDSHALKPAEKSYWPTELEAAAAVWALFRMKRFLDALPGPHLLFTDHLAVTSIADAKPFSSTPAARNPRLVRFTLILAEFCPKLWILHRKGIYMAHVDALSRIQASETELASFHAHELIIDPGLIAHILQSQQSDSMLQLLHQELTATGKGTLPFDNGSFGLNADNILCRITPSGVWKPCIGTAALPRIIGLVHTGHLGTKATFDRFRAVAYAPHLLCHVEDFVKCCTQCQQMRTLHHWPYGSLQPLPAPDTPFTTISCDFIVCLPLACTLFDLDPVDTVLILTDTATCRIYLLSSTTTWSTERWSLRYVEQLLPHVGWPKKIISDRDLQLTSQFWCSLNTCYSCELIFSTAHHKSNGQSKRAIQSVELLLRGLCNAWSDDWADHLPLVELLLGNRPNASMNAAPNDLLYGLRLHDPFTMLQLVMSLSDLTLLDCCLALCQQALDHLALVQAYMHQWYNSLHTPPPKLAISDWVWLELHDGYLLPPSFLPPDQRLGIQHIGPYPIKHMVSNLAYEISLPLESHLHPVISIQHLEPYMPSDKPITTSLVTEILKEHKTHCCSKQYLVCFEHASCDKWVLENTVTNPAILEQWHLRRPLLPPSASPD

SEQ ID NO: 8093 - protein, 2100 aa, synthetic construct
TGDFYKRAFWKRTILNPGLRHRSSRLNYRVTHLDEACGDRWAETPDDVDRNYQWQWDGYPYPQLLPVAQNGWLKIREPATPLRQTVPHLARIRRAISPRIGSCQPLRHTRHLQHHQQSDDPMPTPAVDRQLRARQLLRFVGTDHPHVTHVDRKDIDHARSFYSWFKKWRPVTTTSTPSISSVGSNNHHQAVTTDCPSERNNQPVETASNASEEISTPTLYTHASSTRPSSPTPTTSDLPSTGNTPKTSTYRRSTSTDNNVDMADNGRRQPVPDPDGPLTAQAAAALMAAAFRQHRENQNADMGNLLAAAIDHQQRQQPAASTALQAVDVGYFDPSAKDPSGAGLISGGKINKYTDIFPFCDRLVDLAATHGDDAVRRIWSQCLQGPALVWHSHILTDDDRELLRTATINAICNKLKSRFKIDYSVALDTLKQSRFTMSDVANDKDIMAFVQTMMRNAKACDMSRHGQLIAAFEALDGDIQSELDKPTSTTEIDSFLRQIQERESVLRKRAQRFRQPQQPYRQHHIGIRGNNNNSHSGTVINNNGINHKAKIRGQGLQPQGQQWQYNQYNVGNQPANNQRQYGQQQQQAQQPGAVVPENRRLPAPPQRNQYRPPTPGRAIPAFHGSAQYQQPSVEDAPEQDVAGPDDFGPAESYYGNAPYPDDEYPAAPEWLDVDHRGPDTDTTDTPDDVVAQFVSLSIASKCRHCAKSFPSNNKLMAHIYADHLKRPRPDRKARADTAGAIPSAREVVDAHLAEAHPVADDPMHLSKIVESKNHPRPRSRLYRNVGRQAMVGRPHTVIRHRASPLMVRGIGKGVHNTLDYAIIDLNFYGTLPSGSTAIASFTREVTIVDDLRANMLLGMDCMTPEKFDILLSDEAIVINSCGGIRIPITTKRHGKPIKSKVIAKHRISIPPQTLASIAVNHAVHVDDGQTLLFEPATLNVSVFAAVADCHMESAIVRNDTNRPITVHANQCVGHLVSMEPDCQAYLVDDAAAAELAVHKPAPPPEERRLATMTEDDIKLNTIQHPCGVTIYNLPPAQMAPLWSLVTEYQDVFKDKGFVNLDQDQWMRVKLRPGWHETLPKKCRIYPMNAEDRGVVKDTIGKLESGGKATKTRFQVPFSFPVFVVWRTMPDGTRKGRMVVDIRMLNKIVLPDAYPMKSQDDIMARLANAKYITILDAVAFYYQWLVDPRDRWVFTMNTPEGQYTFNCVVMGYRNSNAYVQRQMNLLLKHIDAADAYCDDVAIGSRKFDTDDGHLAHLRRVFDALRRRNISIGPSKSFIAFPSATVLGRMVNSMGMSTTTERLSAITKLNFPATLKDLEYFIGATGWLRHNVPLYSILVEPLQRRKTALLKTRNRKGKRRSWSHAVQLLLPTSEELASFEAVKAALSRHTTLAFFRDADPFCIDVDVSALGIGAEVYHIEPAALQKVTKDGLIVKYPPRTAIQPLAYLSRTLSLAERDYWPTEMEVLGLVWVLAKCKRWITATKSSPLYVFTDHKSILGLNNRTADITSSTSTTNKRLIRAAEFFSTFDLRIQHKPGKFHVVADALSRLPSTNNVTDPQAPGGLDNLPNDREEHWAFCAATAPLRLPSIRTFPEPADKDVDLGQPTATTTSGIVTLDIHPEFVERLQEGYLQDPVWKRTMTVIRQNNSLLPANRANLPFELHKGLLWKTGGQVPRLCVPRTCLTDILNAIHDGNHRGFQALRTRLSNFCISQPTKMLRAYVNACPQCKANDRRHHSPYGSLQPLTGNECPYYMITIDFIVDLPTSTDKLDVALVIVDKLSKETQIVLGKSTWKSSHWGPQLLNRLLTANWGLPKVILSDRDPKFTAALWRAIWKTLGTNLLYTTAYHPSTDGQSERTIQTIESALRHYIQALDDFTRWPETVPRLQFEHNNIRSRTTGKSPNEIVKGFNPVAVADVIGDHQPARDPNLPQLRMEAHDAVAIAAMTMKHYYDRRHMPRFFDVGSKVWLRVHKGYNMPATDLIGPKFSQQYAGPLEVVERVGRSAYRLRLPPSWRIHDVVSIDHLEPHTFDPYGRQLPAIQPVTTHNQTVKAIVSHRLRGNGNQYLVKYDGLGAEFDQWLPEQRLASIAPGILQQWLQQQQHHK

SEQ ID NO: 8094 - protein, 286 aa, synthetic construct
PAITQYDPALPLFQPIGRTNNNITINPIACPVYRKLSHDDFLLAVDANGTETACIRQETAVSLWTTLKDIGLAINKAGNPGRNEAVHLLNQYYEIPHYKFDRLGLQRPLILDLVRPNLHNIFNPLYAWGPKEYLTKTYQALQIVGRVALRWIDDAKKVCQELGPDCGWDWEEGNEIEEEAPPMPIQAHPLNPYNDLTTRDPRVRPYPARQEIRNSTNRDLILHPTASSAARANMQIVVHPNRSNAARANNSVTIYRRGNRMARASAYSTDGSEYVIRNGKQTNTNF

SEQ ID NO: 8095 - protein, 1411 aa, synthetic construct
SKEVGATPGLVPTHSPEVQGPKSYANVVSSRPSLTKFNVDVSVVDGKSMVVVPDVVLEDSVPLWDDFLVGRFPSSAPHIAKIHVIVNKIWNLGDKSIRIDVFAVNDNTVKFRIRNASARLRALRRGMWNICDLPMIVSKWTPIVEDAQPEIKSMPMWVVIKNVPYSMFTWPGLVAVGNDLVESVPLVDSQALEVVKGDIAEEVEEGEIASNSNQKSVQGEKIQEEGDWLTVSSSGGKKYISKVRKDFNLWSILEEVQNEDSVGKETEDSVKGVLEVVVVEGKEEMALNKTQQVKSCFDGASTRVSIPRSSKKAHKFVSVPNQKATDVLPRQFGCVLETRVIESKVPVIFAKVFKDWQMVSNYEFNRLGRIWVVWSSSVQLQVIFKSSQMIVCLVRVEHYDVEFICSFIYASNFVEERKKLWQDLHNLQNSVAFRNKPWLLFGDFNETLKMEEHSSYAVSPMVTPGMRDFQIVVRYCSLEDMRTHGPLFTWGNKRNEGLICKKLDRVLLNPEYNSAYPHSYCIMDSGGCSDHLRGRFHLRSAIQKPKGPFKFTNVIAAHPEFMPKVEDFWKNTTELFPSTSTLFRFSKKLKELKPILKDLSRNNLSDLTRRATYAYEELCRCQTKSLTTLNPHDIVDESLAFERWEKERHLLNAIHEVMDPQGTRPPNQDDIKIEAVRFFSDLLSSQPSDFTGISVDELKGILQYRYSLHEQNLLVAEITEAEVMKVFFSIPLNKSPGPDGYTVEFFRETWSVIGQEVTMAIKSFFTYGFLPKGLNSTILALIPKRTYAKEMKDYRPISCCNVLYKAISKLLANRLKCLLPEFIAPNQSAFISDRLLMENLLLASELVKDYHKDGLSPRCAMKIDLSKAFDSVQWPFLLNTLAALDIPEKFIHWINLCISTASFSVQVNGLRQGCSLSPYLFVICMNVLSAMLDKGAVEKRFGYHPRCRNMGLTHLCFADDIMVFSAGSAHSLEGVLAIFKDFAAFSGLNISLEKSTLFMASISSETCASILARFPFDSGSLPVRYLGLPLMTKRMTLADCLPLLEKIRSRISSWKNRFLSYAGRLQLLNSVISSLTKFWISAFRLPRACIREIEQISAAFLWSGTDLNPHKAKVAWHDVCKPKSEGGLGLRSLVDANKICCFKLIWRLVSAKHSLWVNWIQNNLIRTVAEALSSHRRRSHRDDILNDIEEELEKLLCRGICTEQDRSLCRSIGGQFKAKFFSPEIWHQIREQGLVKQWHKAIWFSGATPKFTFISWLAAHDRLTTGDKMASWNRGISSVCVLCNISAESRDHLFFSCNFSSHIWDRLTRRLLLCRYTTNFPALLLLLSGQDFSGTKRFLLRYVFQATIHTLWRERNKRRHGDLPIPSDHIIKFIDRQTRNRLSTITKQGLHKYADGLRIWFAARDNLTPNH

SEQ ID NO: 8096 - protein, 1254 aa, synthetic construct
NKTLRVIQLNVRKQGAVHESLMNDEETQNTVALAIQEPQARRIQGRLLTTPMGHHKWTKMVPSTWREGRWAVRSMLWINKEVEAEQVPIESPDLTAAVIRLPERLIFMASVYVEGGNASALDDACNHLLDAITKVRRDTGVVVEILIMGDFNRHDQLWGGDDVSLGRQGEADPIIDLMNECALSSLLRRGTKTWHGGGHSGDCESTIDLVLASENLADSVIKCAILGTEHGSDHCAIETVFDAPWSLPKHQGRLLLKNAPWKEINTRIANTLAATPSEGTVQQKTDRLMSAVSEAVHALTPKSKPSSHAKRWWTADLTQLRQIHTYWRNHARSERRAGRKVPYLETMAQGAAKQYHDAIRQQKKKHWNQFLADNDNIWKAERYLKSGEDAAFGKIPQLLRADGTTTTDHKEQAEELLAKFFPPLPDNIDDEGTRPQRAPVEMPAITMEEIERQLMAAKSWKAPGEDGMPAIVWKMTWPTVKYRVLDLFQASLEGGTLPRQWRHAKIIPLKKPNKENYTIAKSWRPISLLATLGKVLESVVAERISHAVETHGLLPTSHFGARKQRSAEQALVLLQEQIYAAWRGRRVLSLISFDVKGAYNGVCKERLLQRMKARGIPEDLLRWVEAFCSERTATIQINGQLSEVHSLPQAGLPQGSPLSPILFLFFNADLVQRQIDSQGGAIAFVDDFTAWVTGPTAQSNREGIEGIIKEALHWERRSGATFEAEKTAIIHFTPKTSKLDREPFTIKGQAVEPKDHVKILGVLMDTSLKYKEHIARAASKGLEAVMELRRLRGLSPSTARQLFTSTVTPVVDYASNVWMHAFKNKATGPINRVQRVGAQAIVGTFLTVATSVAEAEAHIATAQHRFWRRAVKMWTDLHTLPDTNPLRRNTARIKKFRRFHRSPLYQVADALKNIEMETLETINPFTLAPWEARMQTDGEAMPDPQAIPGGSIQIAISSSARNGFVGFGVAIEKQPPQYRKLKLKTFSVTLGARSEQNPFSAELAAIAHTLNRLVGLKGFRFRLLTSNKATALTIQNPRQQSGQEFVCQMYKLINRLRRKGNHIKILWVPASEDNKLLGLAKEQARAATHEDAIPQAQVSRMKSTTLNLARSQAATTKALPEDVGRHIKRVDAALPGKHTRQLYDGLSWKEATVLAQLRTGMARLNGYLYRINVAQTDQCACGQARETVEHFLFRCRKWTTQRIALLQCTRTHRGNLSLCLGGKSPSNDQQWVPNLEAVRASIRFAMTTGRLDAV

SEQ ID NO: 8097 - protein, 1086 aa, synthetic construct
THANGQTTNKIYVTCICGKLCKNHWGLKIHLARMKCLEQESKVQRTGPEPGETQEEPGPEATHRAKSLHVPEPQTPSEVVQQRIKWPPASKRSEWLQFDEDVSNIIQAIAKGDADSRLKTMTTIIFSYALERFGCIEKGKTKPTTPYTMNRRATQIHHLRQELRSLKKLYKKATDEEKQPLAELKNILRKKLMILRRAEWHRRRGRERARKRAAFITNPFGFTKQLLGDKRSGRLECLIEEVNRFIEETVSDPLREQELEPNKALISPTPPAREFSLRGPSLKEVKEIIKASRSASTPGPSGIPYLVYKRCPGLLLHLWKILKVIWQRGRVAEQWRCAEGVWIPKEENSKNINQFRIISLLSVEGKVFFSIVSRRLTEFLLENNYIDPSVQKGGIPGAPGCLEHTGVVTQLIREAHENRGDLVVLWLDLANAYGSIPHKLVELALHRHHVPSKIKDLILDYYNNFKMRVTSGSETSSWHRIGKGIITGCTISVILFALAMNMVVKSAEVECRGPLTKSGVRQPPIRAYMDDLTITTTTVPGSRWILQGLERLIAWARMSFKPSKSRSMVLKKGKVVDKFHFSISGSVNPTITEQPVKSLGKLFDSSLKDSAAIQKSKKELGAWLAMVDKSGLPGRFKAWIYQHSILPRVLWPLLIYAVPMSTVESLERKISGFLRKWLGLPRSLTSAALYGTSNTLQLPFSGLTEEFIVVRTREALQYRDSRDGKVSSACIEVRTGRKWNAGKAVEVAESRLQQKALVGTVATGRAGLGYFPKTLVSQVKGKERHHLLQGEVRASVEEERVSRVVGLRQQGAWTRWNTLQCRITWANILHADFQRVRFLVQAVYDVLPSPSNLHIWGKNETPSCLLCSGRGSLEHLLSSCPKALADGRYRWRHDQVLKAIAASLASAINTSKNHRAPRKAVHFIKAGEKPRALPQLTTGLLHKASDWQLEVDLGKQLRFPHHIAATRLRPDIIAISEASRQLIILELTVPWEERIEEANERKRAKYQELVEACRERGWRTYYEPIEIGCRGFAGRSLCKVLSRLGITGVAKKRAIRSASEAAEKATRWLWIKRADPWTAVGTQVGT

SEQ ID NO: 8098 - protein, 768 aa, synthetic construct
ERSVEEKRKNWRMVDWKEYREKLEANLRKEMGVGEIEDEDELEVEVDALIRAIGMTTEQVVKILERVDWSRGWWNDECRRKKKEFNEARREAWKYRAMPEHPALEEERRIGREYRTLIERTRTECWNEWVREVTELQTWTLNKFIGNTPGDGGLDRMPTLRWTDENGVEVIATDGRSKAKGLVRQLFPERPAESGVPEGYEYPEPVEYEARMTEERIKGAIKSLKAYKAPGPDGIPNVVWKECVELLAPQLERIFKAVYEKGMYSERWKEWTTVVLKKPGKPRYDTPKAWRPIALMNTMGKILTALLTEDLKYVTEKYSLLPNTHFGGRPGRTTTDAIQLLTSWIKGHWRKGNVVSVLFLDIEGAFPNVVVSRLAHNMRRRRVPEFIVKLIEHQLRDRRTKLKFDDYESEWVPIDNGSGQGDPKSMLEYLFYNADLIDLVAGLGEELEEGENGEDAPRGSARERGTEKRDENAAAFVDDAWLGGAGATFEEANETLKDMMNRRGGAMEWSKKHNSKFEISKLVYMGFTRRMRRTREGEGGKMTAEERPELEMEGAGNDGGGEGDKVEHGVQENGESEERSGTEGAEDVVQRGDDTKGNIRIGNMVHTSEGDRGEEEEGGISFGDSKTHESTQNLPASNNWSAKDNGHGRLGDPRGDTTINGNAQLDMSKGLDTVVNCCFLAYKSLIALASLVALSSLALPLWFQDTTSDDPESTPTTQGSAISGKETTEETPVADTQAGRSIPRNTDDETGNHRTGCESTKRATTIRN

SEQ ID NO: 8099 - protein, 325 aa, synthetic construct
SSGSRCEDWKRVRNLQRLLLKSYSNVLLAVRRVTQINAGKNTPGIDKMLVKTGPAKGKLVDLLKPQNAWQPLAARRVQIPKRNGKRRPLGIPSIIDRCLQAVVKAALEPCWEAQFEPTSYGFRPSRSVHDAIARLYVTANVNNRKKWVLEADIAGCFDTIDHDFLLQQIGHFPARRVIAQWLKAGYVENGIFHPSEAGTPQGGILSPLLANIALHGMETALGITRYAQGCVKRTVKRVLVRYADDCVVVCDSQVEAEQAQVDLQRFLKFRGLELSEEKTRIVHLSEGFDFLSFNVRHYRSQNTRTGWKLLIKPAKSGGSKRTADG

SEQ ID NO: 8100 - protein, 324 aa, synthetic construct
SSGSSGTPESKQSQPGGRKPPLMCHPAITYDAMCSLAGLQRAQISLIEELKRRGEGSKHALSYEDLTELGALLRSHQYSHRPCRLMTIKVGSKKRDIDSPDWLDRIVQRTYVDTIYPLVQQMACDSSHAYLYKRSIHTALWRLIMNIEHFGYSHVFRTDIESFFDSIPHAEMERVIDLHIRDIELNAFSHELLRVAEGFKNSKVGLPTGWLIPPLWANMLLTPVDARLESAGLKFFRYGDDYGILQRSKQEAEFAQGLLESALKPLGLHLKPGYSHKTYTRKLEDGLIVLGHEIRRINNRLTVAISKNSLAETRSGGSKRTADG

SEQ ID NO: 8101 - protein, 274 aa, synthetic construct
SSGSDEVSVTDRSLEQAFNAVFHDRESFNDFCTLPLAPEVSEIPLHLRKVYRPSDKLKTYLRFIDKVVLRHLKYNASVVHSYIKGSSALTAVQAHAKNQAFFLSDIKSFFPNIGDQDVRKVLMRDSHRIPILDFDQHIERVTKLMTLDGVLPVGFPTSPKLSNGFLHEFDNALAAYCDSTGLTYTRYSDDIIISGMDRAKLTVLREKVQMMLEEHASKSLRLNDEKTRVTHRGNKVKILGLVITPDGQVTIDVSRKHALEGLLHSGGSKRTADG

SEQ ID NO: 8102 - protein, 269 aa, synthetic construct
SSGSLRNFGLPVISSLEDFASSTRLSVSFIKYYLFQTDSHYKVFSIPKKKGGERIIAQPSRNLKAIQSWILRNILDRLSSSENSKGFEKGDSILNNALPHSGASYILSIDIEDFFPSISANKVHSVFRSLGYNSDVCKILTTFCTYKGRLPQGAPTSPKLANLVSQQLDARIQGYAGPKGIIYTRYADDLTLSSNTVKKLEKARDIIGLISKSEGLKINSLKTKLTGSRSRKSVTGLIVTKEGVGIGRAKYRELRSHIYSGGSKRTADG

SEQ ID NO: 8103 - protein, 358 aa, synthetic construct
SSGSEIPLIYSNRKLYEYIKNNKDDFLQCDIHKESDSILTIPFTYLVRKNENEYRRLSLLHPIAQLQVANTLMKYDNLLLNYFNSNSTFSIRTPVGINDSYLNIENRHKLELEWIEKERAKDFSDEENEFVSNYFVIKKFKTITEFYKSDYVKNLELKYKNLIRIDYANCFENIYTHSLEWAYVGNKNIIKNNLHDERFSAKLDILAQRINYNETNGLVVGPEISRTLAEVVLARIDKNVYFDLKEKNIIYKRDYEVVRFIDDIMIFYNAENIGDYIKESIENYSREFKLKINSSKTKYEKRPFFREHMWISHSKKSIRSFLKYYDGSINYSGYTYDRFIEEFKELICSGGSKRTADG

SEQ ID NO: 8104 - protein, 323 aa, synthetic construct
SSGSKLNKSILESYLQWYPFSKLTENSKCTILSEKFFFNFIKNGAIFKEYNTFNFPSHYSQKTSASFRNMTLVSPFVYLYIEVVGYHISKKYTRKSKYVRCYYSGDLSENEFSYKNSYDKFFADINALSSTYDNFYKFDISNFFDAVDINLLFKLINEGEEILDTRSSLIYKRLLQQIGGNKFPTLENSSTLSYLATYIYLDKVDYELEKVLQKNSKIESFQIIRYVDDLYIFFNTMESELNLVSSEIKNVVIDAYRKVKLNLNENKTKLGKSSEVNETLSVALYNHYVYKEEIDIAHFYDKNKILLFLDDLYSGGSKRTADG

SEQ ID NO: 8105 - protein, 282 aa, synthetic construct
SSGSSRAAGIDGITVDLFTGIAREQIHQLYRQMRQERYVARPAKGFYLAKQKGGHRLIGIPTVRDRIVQRYLLQSIYPSLENAFSDAVFAYRPGLSIYAAVKRVMERYRYQPTWVIKADIQQFFDQLSWPLLLHQLDQLSLPATWVQWIEQQLKAGIVVSGQFYQPGQGVLPGSILSGALANLYLNDFDRHCLEADIPLVRYGDDCVAVCQSYLEASRSLALMQDWIEGLSLSFHPEKTTIIPPGQAFVFLGHRFRNGTVEGPARQKAEGRRSGGSKRTADG

SEQ ID NO: 8106 - protein, 300 aa, synthetic construct
SSGSVWESYKKVRANKGSSGVDGVSLQQFEEKLSDNLYKVWNRLSSGSYFPPAVKEVEIPKKDGGKRLLGIPTVGDRVAQMVVKDYLEPRLEKEFLNQSYGYLKSDKKISELSGKRRLEIEGEARISRAMCHFRLLECYGQFFDLNSEYGVVIKMSASREIEAIKRSTVKQTYDSILVDLNFGIANAPVVSPHDKFSQTLAKAHKAKVLLYMGEYADAASVALDAMGDANYKLEDTYQEIFAKGYKAREVLFSPYMVYEEKSNTWTYAGFYCPVAQIETMADNEKADEVDSGGSKRTADG

SEQ ID NO: 8107 - protein, 325 aa, synthetic construct
SSGSATYDNFLLAWQRTVNTTSRMIRDELGMKIFAHNLQTNLEYLVQQVKAKDFPYKPLADHKVYVPKPSTTLRTMSLMAVSDVIIYQALVNIIADKAYSYLVTHENQCVLGNIYSGPGKRWMLRPWKKQYTRFVDCIENLYHAGNPWIASTDIVAFYDTIDHARLLSLIRKYCGDDQQFQELLQECLAKWAVHNSNITMGRGIPQGSNASDFLANLFLYEIDKEMIVNGYHYIRYVDDVRILASDKSTVQRGLILFDLELKRAGLVAQVTKTSVHEIEDIETEISRLRFIITAPTRNGNCLLVTLPSLPKSEQASGGSKRTADG

SEQ ID NO: 8108 - protein, 308 aa, synthetic construct
SSGSSGLLPLLGKREVWDEFLSYKAEKQHLSRKDARYWTKFVEEEQYRSVTDHILEPDFSLSVPVKLSVNKSNTGKKRVVYSFPEQESMVLKLLGHLLSRYDACLSPACYSFRKNITAKDAVSHILAVPGLSRKYVLKMDIRNYFNSMPVSSLLHVLKEILSDDPFLYSFLERMLTANEAYEHGRLITEERGAMAGTPTSAFFADVYLLSLDNYFAERGIPYFRYSDDILILADSPKELLSYREIAAKLIEEKGLSLNPDKLSVTPPGGAFEFLGFSIRGTDCPEKGMPAGKVDLSEASGGSKRTADG

SEQ ID NO: 8109 - protein, 336 aa, synthetic construct
SSGSRCMQRITKLYNKLLRSNRIFEQDQAGINISDIYTDKKNITKILIRELLNGSYKPMQYDERKVYINSKMRLIANYSFIDRLLLSILYDLFRERTLNLISPSVYSYISGRSAKQAIQSFCSYLKQIQAPNKQINLYVLRADITNYGGSIPADTHAIFWNYFYDILEEIKDLEQRDCLRIVIEEALRPILHTEDNLPYQKIVGIPVGSPLATLIYNLYLSELDEALSDIPYGFYARYSDDFIYANTDVNQFKEGERRITAILEKLRLRCNPSKNQRFYLTHAGKPSIDSEHFIGSNRIELCGLIIFSDGTRTLKRSIIQKMLERISGGSKRTADG

SEQ ID NO: 8110 - protein, 355 aa, synthetic construct
QYQLQDAYGYCSYPRPQAAKSLLEKSLSDASLHQACQTMYPRQANFDSSDTDEEHHDAIDELLTKLYVSRERIFKREFTPSQLHSVEIEKPEGGTRLLSVPNWHDRTLQKAVTECLGNTLEHIWMKHSYGYRKGHSRLQARDQINQYIQQGYEWVLESDIESFFDSVNWLNLEQRLKLLLPNEPLVPLLMQWVSAAKQTEDEQTLARHNGLPQGAPISPILANLLLDDLDQDMIAKGHQIVRYADDFVLLFKSKAAAESALDDIITALKEHHLAINLEKTRIVEASQGFRYLGYLFVDGYAIETKREYRKEHAQLDKQLNASSLENEPSLQQEPAVQNEQSTLIGEREKLGTLKL

SEQ ID NO: 8111 - protein, 392 aa, synthetic construct
GWLYNQMAMPETIFQAWYKVASNDGRPGWDNKSIEDYSLQLEENLKALSQALLTGTYKQGPLMKLVLLKPDGKDRVLLIPGVMDRVAQTAAAIVLSPIIEAELGNCTFAYRPGISREGAAREIDRLHREGYQWVLDADIRSFFDNVRHDLLFQRLVELIDDKEMISLLHRWLTAEIVDGINPRIQNTMGLPQGCPISPALANLYLDRFDETMEKEGFKLVRFADDYLVLCKTRPKAEAALKLSETALAELKLELHSDKTRITTFAEGFKYLGYLFIRALVIPTKMHPEEWYDKLGKFKLRKKSEHALPSDPDAMTGETAKFELETDQGEKIELTKNELLQTEFGCKLLESLDKKQLSVDEFLEKVARQDEERQKEKRDALKKLYSPFLNTKL

SEQ ID NO: 8112 - protein, 401 aa, synthetic construct
SSGSKWKTLKKKRRYITNYQKIDSIKNNADSLFETIRYYKEKHPNELFIINLNKFVKDIQDSILNTNFCFTSPKIIPLSKKDQSKCRPIALYNLKDRIIISLTNKYLSEYFDEHFFPESHAFRPKRIYKGKKVVTSHHHAMDSILKYKSDYKGKKLYVSECDISKFYDSVNHTIVKECFKKLISQSNLVIDSNAKRIFYKYLESYSFVHNVKIYNHKKYSDYWQQYKIDNGYFGWIDDDLKDLKYYKSVNHNRVGVPQGGAISGLIANMVLHFADLELLKKKDSKLHYVRFCDDMVIIHPNKKQCEDYYQVYNESLKKLKLVPHLPLNFNFNNKQILKEFWSEDTKSKSPYRWSGSFRNSTKWIGFVGYEVSFNNEIRVRKRSLKKEKLKQSGGSKRTADG

SEQ ID NO: 8113 - protein, 346 aa, synthetic construct
SSGSKILQVVDNVERIYREGAGDKATQMIFSDIGTPKSKEEGFDVYNELKDLLVDRGIPKEQIAFVHDANTDEKKNSLSRKVNSGEVRILMASTEKGGTGLNVQSRMKAVHHLDVPWRPSDIVQRNGRLIRQGNMHQEVDIYHYITKGSFDNYLWQTQENKLKYITQIMTSKDPVRSAEDIDEQTMTASDFKALATGNPYLKLKMELENELTVLENQKRAFNRSKDEYRHTVSYCEKHLPIMEKRLSQYDKDIAQSLATKSQDFVMRFDNQAMNNRAEAGDYLRKLITYNRSDTKEVKTLASFRGFDLKMTTRGPSEPLPETVSLMIVGDNQYTVASGGSKRTADG

SEQ ID NO: 8114 - protein, 324 aa, synthetic construct
SSGSMSKLKRLRSASTKPQLARVLEVDAAFLTRCLYINKTQNQYHQFSIAKKSGGTRLINAPSKELKSLQKKLSILLLDCIDEINAEKYPRSQLVKPKLRKNGDPDYAAEVLKIKISTAETKQPSLAHGFVKERSILTNAMMHVGKKNVLNIDLNDFFDCFNFGRVRGFFIKNENFKLDQHIATVIAQISCFDNKLPQGSPCSPVITNLITHSLDIRLASLAKKHKCTYTRYADDITFSTRLSEFPAQIMWHDSTTYRAGKALRKEISRSGFSINNSKTRIQYKDSRQNVTGLVVNKKPNIKQEYWRLVRAKCNSGGSKRTADG

SEQ ID NO: 8115 - protein, 273 aa, synthetic construct
AEFRTKLIELLKEFRDCFAWEYYEMPGLSRSIVEHRLPIKPGVRPHQQPPRRRKADMLEPVKAEIKRLYDAGYNQIFMAEEDIHKTAFRCPGAIGLFEWVVMTFGLKSAGAMYQRAMNYIYHDSIGWLVEVYIDDVVVKSKEIGDHIANLRKFLRFLVHERGIEVTQRSVNAIKKIQPPENKTKLQEMIGKINFVRRFISNLLGRLRHYLLSNECTVICKADVVKYMLSAPILKGRVGKWIFSLTESDLRYESPKAIKGQAVADFIVEHHDDS

SEQ ID NO: 8116 - protein, 297 aa, synthetic construct
SSGSIEMSIDHIVQKRGAPGYDKMQPEELPAYWAKHGERIKETIQNGSYVPRPISIHYIPKADKTKKRKLGIPCIIDRMILYAIQSVMTPYFEEEFSDRSYAFRKGKGCHDALFACLLELNRGAEYVVDLDIKSFFDKVNHTLLFELLDKKIEDPYLLLLLKKYIRTKAVCGKTFYINRIGLPQGTAISPILANMFLNSFDKHLEKMEIRFVRYADDIVIFCHNKEDAHYLLSDAESYLRYKLKLRLNQEKTKIVRPWELEYLGYSFSAASNGNMFFSLGEKTKQHMSGGSKRTADG

SEQ ID NO: 8117 - protein, 212 aa, synthetic construct
KYLVEVQDEVKPRGVLNIIPKQDNFRAIVSIFPDSARKPFFKLLTSKIYKVLEEKYKTSGSLYTCWSEFTQKTQGQIYGIKVDIRDAYGNVKIPVLCKLIQSIPTHLLDSEKKNFIVDHISNQFVAFRRKIYKWNHGLLQGDPLSGCLCELYMAFMDRLYFSNLDKDAFIHRTVDDYFFCSPHPHKVYDFELLIKGVYQVNPTKTRTNLPTH

SEQ ID NO: 8118 - protein, 422 aa, synthetic construct
EFRTKLIELLKEFRDCFAWQYYEMPGLSRSIVEHRLPTEPGVRPHQQPPRRCKADMLEPVKAEIKCLYDASFIRRCRYAEWVSSIVPVIKKNGKERVCIDFRDLNKATPKDEYPMPVADQLVDAASGYKILSFMDGNVGYNQIFMAEEDIHKTAFRCPSAIGLFEWVVMTFGLKSAGATYQRAMNYIYHDLISWLVEVYIDDVVVKSKEIEDHIADLRKVFERTRKYGLKMNPTKCAFGVSAGQFLGFLVHERGIEITQRSINVIKMIKPPEDKTELQEMIGKINFVRRFISNLSGRLEPFTPLLRLKADQQSTWGAEQQKALDNIKEYLSSPPVLIPPQKGIPFWLYLSAGDKSIGSVFIQKLEGKERADVVKYMLSAPILKGRIGKWIFSLTEFDLWYESQKAIKGQAIANFIVDHRDDS

SEQ ID NO: 8119 - protein, 451 aa, synthetic construct
VAVSDIRVVQEFQDVFQSLQGLPPSQSDPFTIELEPGTAPLSKAPYRMAPAEMAELKKQLKDLLGKGFIRPSTSPWGAPVLFVKKKDGSFRLCIDYRELNRVTVKNRYPLPRIDELLDQLRGATCFSKIDLTSGYHQIPIAEADVRKTAFRTRYGHFEFVVMPFGLTNAPAVFMRLMNSVFQEFLDEFVIIFIDDILVYSKSPEEQEVHLRRVMEKLREQKLFAKLSKCSFWQREMGFLGHIVSAEGVSVDPEKIEAIRDWPRPTNATEIRSFLGWAGYYRRFVKGFASMAQPMTKLTGKDVPFVWSQECEEGFVSLKEMLTSTPVLALPEHGQPYMVYTDASRVGLGCVLMQHGKVIAYASRQLMKHEGNYPTHDLEMAAVIFALKIWRSYLYGGKVQVFTDHKSLKYIFTQPELNLRQRRWMELVADYDLEIAYHPGKANVVVDALSRK

SEQ ID NO: 8120 - protein, 631 aa, synthetic construct
RKLENTLESETELKRTLDKLYSKTKEHMEKKTRIKHTSLLEIAMSKPNIVTAIHSLKSNKGSMTPGVDGKTIQDYLRLSEEKLIELIRGRLTNFKAHLIKRVFIPKANGGQRPLGIPTIEDRIIQQMMKQVLEPVLEAQFFKYSFGFRPERTTYHALERVKVLVHNTGYHWIVEGDIRQFFDKVNHRILIKKLWSMGIKDRRILCLITEFLKAGIFKNIIRNDNGTPQGGILSPLLANVYLHSFDKWVAKQFEEFTTRHEYSKHDHKLRGLKSSNLKPGYLIRYADDWVLVTNNKSHAYRWKTVIKNFLQKELKLELSEEKTRITNIRHKPIEFLGFKYKVVLKGVKGKKKKDKKTRYISQITPSDKKIKRKVKELRATLTSLGKRLSHDKLSNAQLILAYNSKVRGLINYYSYATESPIMDREGYKLRKKTFNLLSRRGGVLHPINKCINLADKYPKRTQKTLAIKTEVGYIGIMHLNLTKMNENLYKQKVQNETPYSPSGRKLIERRKGTKEFSVRLDEITSLSLLEKVRKKLVNSPRYNFEYFMNRGYAFNRDRGKCRITGVPLGKHNLHVHHINPNLPLEEVNKLPNLACVDKEIHKAIHNEVDMSSILNNKEINKLKRFRNKIHAI

SEQ ID NO: 8121 - protein, 329 aa, synthetic construct
SSGSKLEYKKVRKLNKLLINSFYNWVVQIHQVAPEGKDNSRGDGKTLRIWNKGRVLNTKELVEWRTRAIEVWRRNQSYQPKKLKRIYIPKPDGTERPLSIPTWFDQIIQAIIGNVVECQVESIIEANDLKAYGFRKGFKTADAIQGLQGYALTGKKQKLVEFDRSKFYETIPDDKLLAVLENVDRYTRNNIEKMLKNESLDLKGIVTKPEMGTPQGGNISPILANLYASTQIMLPFKKESQSKLTMYADDGIIICDNKENPEMALAKLEAIAEKAGLKLKKDKTKIIDGDRFNFLGYEITRGKGIRLQKDMIKKCQKDGSGGSKRTADG

SEQ ID NO: 8122 - protein, 277 aa, synthetic construct
SSGSFGIDIENATFKIVVINDKNNLSGTKKRRVIHMPSPEMRIIHKRLIRWIRGQKRLVPISASGSRPGDSVFKSVFIHKKTRKHSYVSNGYTHIDTIGWFPRHFFCLDIKDAFPSVSVSKMTEALLFAGLDPNDYSYNKVISILERYCFTKEDGLIVGANASPDLFNIYAEYFLDRNLRRYCHEHSLVYTRYLDDLIFSSNKTIGKRKRKSIYKFIDESGLKVNEKKTKIYDLRKGCAVINGIGVNEKGRMFIPRQYLDTLRGYMNSGGSKRTADG

SEQ ID NO: 8123 - protein, 321 aa, synthetic construct
SSGSFSANHCTAEDVANLFNYLNSHGEGNVEREMLLKVIAEPEERKVLQEVKCLIDRYYPKRKKNPLEGIPKIKQFVTRFRNKERHYRSFAIPKRNGGRRIIEAPTQELANIQRLILKKILYRNQIWNSNSSVHGFVPGRNILSNASLHKEATVIVRIDLKDAFRNTKEEMLVKHLKEYFTEKGAKILVRLCTYKGHLPQGAPSSGMLLNFVLGELDGKLKKIAGFMGWRYSRYADDLTFSCVEFNKHTVGIGKLIERVKSMIKDYSYRVNEEKIRVFKKNRAMRVTGLVLNSGKPTISRKFRRNVRAKVHSGGSKRTADG

SEQ ID NO: 8124 - protein, 376 aa, synthetic construct
FEVELTQENYRLPIRNYPLPPGKMQAMNDEINQGLKSGIIRESKAINACPVMFVPKKEGTLRMVVDYKPLNKYVKPNIYPLPLIEQLLAKIQGSTIFTKLDLKSAYHLIRVRKGDEHKLAFRCPRGVFEYLVMPYGISTAPAHFQYFINTILGEAKESHVVCYMDDILIHSKSESEHVKHVKDVLQKLKNANLIINQAKCEFHQSQVKFIGYHISEKGFTPCQENIDKVLQWKQPKNRKELRQFLGSVNYLRKFIPKTSQLTHPLNKLLKKDVRWKWTPTQTQAIENIKQCLVSPPVLRHFDFSKKILLETDASDVAVGAVLSQKHDDDKYYPVGYYSAKMSKAQLNYSVSDKEMLAIIKSLKHWRHYLESTIEPF

SEQ ID NO: 8125 - protein, 497 aa, synthetic construct
ELVEHRLPIKPGFRPYKQPPRHFNPLLYDRVKEEIDRLLKAGFIRPCRYAEWVSSIVSVEKKGSGKIRVCIDFRDLNKATPKDEYPMPIADMMINDASGHKNAGATYQRAMNLIFHDLLGIILEIYIDDIVVKSDGMEGHIADLRLAFERMRQYGLKMNPLKCAFGVSAGRFLGFMVHERGVEIYPKKIEKIRDFKAPICKKEVQKLLGMVNYLRRFIFNLAGKIDAFVPILHLKKEADFTWGAKQQEAFEELKRYLSTPPVVRAPKAGKPIRLYIASEDKVIGAVLTQEEDGKVYIITYLSRHLLDAETRPILSGRIGKWAYALIKYDLAYEPLKSMRGQIACDFIVDHHVDIAYEEDVCLVEVIPWKIYFDGSSCKEGQGIGVVLFSPNGMCYEASVRLEYYCTNNQAEYNALLFDLQVMEMVGAKYVEAFGDSELVVQQVAEVYKCLDGSLNRYLDSCLDIIANFDNFAIRHIARHDNSRANDLAQQASGYDVK

SEQ ID NO: 8126 - protein, 312 aa, synthetic construct
SEFRTKLIELLKEYRDCFAWEYYEMPGLSRSVVEHRLPIKPGIRPYQQPPRRCKADMLEVVKAEVKHLYDAGFIHPCRYAEWVSNIVPVIKKNGKVRVYIDDEVVISKEIEDHIADLRKVFERTRKYGLKMNPTKCAFGKLEPFTPLLRLKADQKFTWGAEQQKALDNIKKYLSSPPVLIPPQKGISFRLYLSAGDKSIGSVLIQELERKERAIFYLSRRLLDAETRYSPVEKLCLCLYFSCTKLRHYLLSNECTVICKADVVKYMLSAPILKGRVGKWIFALTEFDLRYESPKTIKGQAIADFIMDHRDDS

SEQ ID NO: 8127 - protein, 504 aa, synthetic construct
DTDHRTDKVWVLGIQRKLYQWSKANPDDQWRDMWGWLTDLRVLRHAWQRVASNKGGRTAGVDGMTVGRIRNRSEHRFLVDLQADLRSGAYRPSPARRKLIPKAGKPGQFRPLGIPTIRDRVVQGAAKILLEPIFEAQFWHVSYGFRPGRNTHGALEYIRRAALPQKRDEDTRRNRLPYPWVIEGDIKGCFDNINHHHLLERMRKRIGDRRVVRLVGLFLKAGVLTEDQFLRTDAGTPQGGIISPLLANIALSAIEERYERWTYHRKKTQARRKSNGVAAAASARDSDRIAGRCVYLPVRYADDFVVLVSGSLEEAMAEKSALADYLIKTTGLTLLPEKTKVTAMTEGFEFLGFRFSVHWDKRYGYGPRVEIPKAKAANLRHKVKQLTQRDSISVSLGEKLRGVNAITSGWANYYRYCVGAGRVFVALDWYIGLRLYCWLHKKRPKATPSELWGSKQPSRRRATRRVWREGSVEQHVLGWTPVDRYRLAWMDMPDFAMSSGEPDA

SEQ ID NO: 8128 - protein, 356 aa, synthetic construct
SPVLAELKEQGIVIPTHSPFNSPVWPVRKPNGKWRLTIDYRRLNANTGPLTAAVPNISELIAAIQEQAHPFMATIDVKDMFFMVPLHPDDQLRFAFTWEGQQYTFTRLPQGFKHSPTLAHYALAKELEQIPLEEGVRLYQYIDDILIGGDHLTPVKIMHDKIIKRLEELGLTIPPDKIQSPAAEVKFLGIWWKGGMACIPQDTLSALDQLKMPENKKELQHALGLLVFWRKHIPDFSIIARPLYDLLRKGVSWGWTPVHEEALQLLIFEAITHQSLGPIHPSDPVQIEWGFAHSGLSIHLWQKGPEGPIRPIGFYSRSFKDAEKRYSQLEKGLFVVSLALREAERTIRQQPIILRG

SEQ ID NO: 8129 - protein, 300 aa, synthetic construct
SSGSNVRSIMPLSKGKSLLHRTFTTANLDSSLKTLPNSSPGPDTITTDDLKKAGDQFLDKLKNNIVNGNYKQGKTKQYRIPKNDDTFRYIYVLNTTDRLVHKTIADYISPIVDNIISNSAYAYRRGLNTKGAANALNNALKEGYTSGIKADISEFFDSINISALSMMIDSLFPFEPLADFINGILENNTRDGIKGILQGSPLSPLLSNLYLTRFDSDMESKGFFKLIRYADDFVLLLKTASSYEETIKHVEDSLSTLGLKLKPEKTTEITQGKAINFLGYVITDETIAKPSGGSKRTADG

SEQ ID NO: 8130 - protein, 427 aa, synthetic construct
QPLLQFPEGKVRNFQRKLYVKAKQEKTFRFYSLYDKLYREDVLQYAWQQCRANKGAPGADGQSFKDIEEKVGVERFLKEIAEELRNGTYRPMPVRRVYILKPDGSQRPLGIPTIKDRIAQMACLTVIQPIFEADFLDCSYGFRPKRNAHQAIGAITENIKQGFTAVYDADLTKCFDSIQHRLIMDSLAERITDGKVLRLIKGWLEAPIVEPGGPKQGRKNYQGTPQGGVISPLLANIVLNRLDRLWHRPGGPRERYNARLVRYADDFVVLARFIGEPIKNELESIITSMGLNLNEKKTRILDLNKGDILNFLGYSIRISRDKNRRITIKPSDKAIARLRDKIREIISRERLYHGLKGIIAEINPVLRGWKQYFKLTNVSRIFSGLNFYITARFYRVGRKTSQRYSKIFKPGVYVTLRKMGLYCLATD

SEQ ID NO: 8131 - protein, 339 aa, synthetic construct
WFADEPRHTRGGSRMADLYRQVRLMKTLSSAWRVVRASCMQSSSSEIRNEAIEFEADSFRQLKSIQSKLQKKKFEFLPQHGIAKKRPGKSSRPLVIAPIPNRIVQRAILDVLQDNVAYVQEILKVETSFGGIKGKNVALAIAAINKAFSNGVTHYVRSDIPSFFTKVQRAKVVDALAKNIDDVDMVNLFSAAIETTLGNLTDLQRRGLESIFPLSHDGVAQGSPLSPLIANIYLAEFDREMNREGLACIRYIDDFVIMAASEKQVMKGFRAAKAVLRRQGLQVYSPDDDPLKASKGDVRDGFDFLGCYVKPGLVQPSKFARNRLLEKIDSGGSKRTADG

SEQ ID NO: 8132 - protein, 267 aa, synthetic construct
RAAGIDGITVDLFTGIAREQIHQLYRQMRQERYVARPAKGFYLAKQKGGHRLIGIPTVRDRIVQRYLLQSIYPSLENAFSDAVFAYRPGLSIYAAVKRVMERYRYQPTWVIKADIQQFFDQLSWPLLLHQLDQLSLPATWVQWIEQQLKAGIVVSGQFYQPGQGVLPGSILSGALANLYLNDFDRHCLEADIPLVRYGDDCVAVCQSYLEASRSLALMQDWIEGLSLSFHPEKTTIIPPGQAFVFLGHRFRNGTVEGPARQKAEGRR

SEQ ID NO: 8133 - protein, 426 aa, synthetic construct
DTSNLMEQILSSDNLNRAYLQVVRNKGAEGVDGMKYTELKEHLAKNGETIKGQLRTRKYKPQPARRVEIPKPDGGVRNLGVPTVTDRFIQQAIAQVLTPIYEEQFHDHSYGFRPNRCAQQAILTALNIMNDGNDWIVDIDLEKFFDTVNHDKLMTLIGRTIKDGDVISIVRKYLVSGIMIDDEYEDSIVGTPQGGNLSPLLANIMLNELDKEMEKRGLNFVRYADDCIIMVGSEMSANRVMRNISRFIEEKLGLKVNMTKSKVDRPSGLKYLGFGFYFDPRAHQFKAKPHAKSVAKFKKRMKELTCRSWGVSNSYKVEKLNQLIRGWINYFKIGSMKTLCKELDSRIRYRLRMCIWKQWKTPQNQEKNLVKLGIDRNTARRVAYTGKRIAYVCNKGAVNVAISNKRLASFGLISMLDYYIEKCVTC

SEQ ID NO: 8134 - protein, 321 aa, synthetic construct
SSGSQLRVEIRGRRSQPIISSWVSLLESTLFTVSPSTTQLSPTHKSLSYPNYNFIDHIDADLSPHMTVRHILAADLGISVQLISRILANKTQYYRSFEIIRKNGNKRLIEAPRTYLKVLMRYINHHLLTGLAIHDSVHSYRQGKSFLTNAQIHVAKQYVFNLDIENYFGCINKRQVRELFSINDFTASAATLLSELCTFNDRLPQGAPTSPIISNAILFKIDQSMHRYCEKNNLCYTRYSDDITLSGNSRQSIVKAKSRLIAMIHGAGFKINDKKTRLMPYHKQQLVTGVVVNKEATPARNELRRIRAKFHSGGSKRTADG

SEQ ID NO: 8135 - protein, 419 aa, synthetic construct
ALLERILARDNLITALKRVEANQGAPGIDGVSTDQLRDYIRAHWSTIHAQLLAGTYRPAPVRRVEIPKPGGGTRQLGIPTVVDRLIQQAILQELTPIFDPDFSSSSFGFRPGRNAHDAVRQAQGYIQEGYRYVVDMDLEKFFDRVNHDILMSRVARKVKDKRVLKLIRAYLQAGVMIEGVKVQTEEGTPQGGPLSPLLANILLDDLDKELEKRGLKFCRYADDCNIYVKSLRAGQRVKQSIQRFLEKTLKLKVNEEKSAVDRPWKRAFLGFSFTPERKARIRLAPRSIQRLKQRIRQLTNPNWSISMPERIHRVNQYVMGWIGYFRLVETPSVLQTIEGWIRRRLRLCQWLQWKRVRTRIRELRALGLKETAVMEIANTRKGAWRTTKTPQLHQALGKTYWTAQGLKSLTQRYFELRQG

SEQ ID NO: 8136 - protein, 338 aa, synthetic construct
FTQEHLHFAWLQVCAGSKTAGVDGISVELFESMATEQLQNLVYQLNNETYTASPAKGFYIPKKNGDKRLVGIPTVRDRIIQRLLLDELYFPLEGTFLDCSYAYRPGHNILQAVQHLYGYYQYQPKWIIKADVADFFDNLSWALLLTFLEKLSLEPSVLQLIEQQLQSGMIIAGQYRNFGKGVLQGGILSGALANLYLTNFDKKCLSQGINLVRYGDDFVIACNSWQEANRILDKITVWLGEVYLTLQSEKTQIFTPNDEFTFLGYRFAGGEVYAPPPPKPVLKGEWVINDSGNPYFRTKPRPKKPVSHPPKACSIDKPINFPRASLSHYWQETMTTKL

SEQ ID NO: 8137 - protein, 468 aa, synthetic construct
TSSRKEQGQQKTLSRGSLQEEVVNTQGTVRAQSSYPAQVRSDTCGTEYTLLDEMLKLDNMMAALKRVEQNKGAAGVDEVDVKSLRPYLKEHWFRIREELLEGTYKPQPVRRVEIPKSDGGVRLLGIPTLVDRLIQQGLAQVLTPIFDPNFSNSSYGFRPNRSTHQAVKQAKQYIEDGYRHVVDLDLEKFFDRVNHDILMARVTRKVKDKRVLKLIRAYLNAGVMANGVCVRSEQGVPQGGPLSPILSNIILDDLDKELERRGHRFVRYADDCNIYVKTVRAGQRVMEGVKRFVEDELKLKVNEQKSAVDRPWKRKFLGFSFTPERKTRTRIAPKARAKFEDKVRELTSRSRSMSMAKRIDQLNVYLRGWMGYFRLADTRSVIESLDQWTRRRLRMCYLKQWKKPKSVYRNLVKLGLSADFARRISGSGKGYWRLSNTPQMNKALGLAFWANQGLLSLVHLYDKHRSVS

SEQ ID NO: 8138 - protein, 418 aa, synthetic construct
LNQILARPNMIQALKRVEANKGRHGVDMMPVQTLRQHILENWESIKAQILTGTYEPQPVRRVEIPKPDGGVRLLGIPTVTDRLIQQAISQILSKEYDQTFSDNSYGFRPNRSAHDAVRKAKGYMKEGYRWVVDMDLEKFFDKVNHDRLMATLAKRIHDKSLLKLIRKYLQAGVMINGVVSSTEEGTPQGGPLSPLLSNIVLDELDKELEKRGHKFVRYADDCNIYVKSKRAGDRTIASVQRFVEGKLRLKMNESKSAVDRPWNRKFLGFSFSHHKEPKVRVAKTSLQRMKKKIREITSRKKPVPMEHRIEKLNQYLIGWCGYFALADTPSIFSRLDGWIKRRLRMCLWKNWKKPRTRVRNLIRLKVPYGKAYEWGNTRKGYWRISKSPILHRTLGNSYWGSQGLKSLQSRYESLRYSS

SEQ ID NO: 8139 - protein, 417 aa, synthetic construct
WEQVWERENLLAALKRVERNGGAPGIDGMTVEELRPYLREHWLEIRETLDQQSYQPSPVRRVEIDKPEGGVRLLGIPTVLDRFLQQAMAQVLTPLFEPQFSPASYGFRPGRSAHEAVKQAQEYVQAGYEWVVDIDLERYFDQVNHDMLMARVARVVADKRVLKEIRAYLKSGVMVNGVVQDTGEGTPQGGPLSPLLSNIMLDDLDKELEKRGHKFVRYADDCNVYVRTQRAGERVMESVKAYLEKKLKLKVNPKKSKVERATRVKFLGFSFYERNGEVRVRVASQSVARFRKKLRGLTKRTRSGKLEEVIETINGYLMGWMAYYRLADTPSVFAGLDSWIRRRLRQMIWKRWKRGKTRYRELVKLGVPRGRAALGAVGKSPWHMSKTPVVNEALSNAYLRNSGLKSLKARYQELRVA

SEQ ID NO: 8140 - protein, 416 aa, synthetic construct
ERILSRENLIQALERVEKNKGSYGVDEMDVKSLRLHLHENWTSIRNEIIEGSYFPKPVRRVEIPKPNGGVRKLGIPTVMDRFLQQAIAQILTQLYDPTFSERSFGFRPHRRGHNAVRQAKQWMKEGYRWVVDIDLEKFFDKVNHDRLMRKLSSRIQDPRVLQLIRRYLQTGVMERGLVSPNTEGTPQGGPLSPLLSNIVLDELDNELEKRGLKFVRYADDCNIYVRSKRAGLRIMESVTSFIENRLKLKVNREKSAVDRPWNRKFLGFSFTRGKDPKMRVSKESVKRLKQRIRELTSRRHSMKMSDRLRRLNRYLTGWLGYYQVVDTPSILAQIDAWIRRRLRMIRWKEWKTTSARQKNLVRLGIKKAKAWQWANSRKGYWRVAHSPIMDYALNSEYWKGQGLMSLAERYQTRRWT

SEQ ID NO: 8141 - protein, 418 aa, synthetic construct
LERILSRENLIQALTRVEGNKGSHGVDEMPVQNLRAHILEHWTTIRGQLEKGTYYPQPVRRVEIPKPNGGKRKLGIPTVMDRFLQQAIAQVLTDIYDPTFSQHSYGFRPKRRGHDAVREARNYIKQGYRWVVDMDLEKFFDKVNHDRLMRTLSQRINDSRVLKLIRRYLQAGVMEDGIVRPNTEGAPQGGPLSPLLSNIVLDELDKELEKRGLHFVRYADDCNIYVRSKRAGLRVMKSITKFIEGKLKLKVNEQKSAVDRPWKRKFLGFSFTVHKEKPKIRVSKESVQRFKQRIRELTSRRKSMNMKDRIEKLNRYLVGWLGYYQLADTPSIFKGLDSWIRRRLRMIRWKEWKKVKTKYKNLMKQGINKGKAWEWANTRKAYWRIANSPILHKALGDRYWSNQGLKSLYYRYQTLRWT

SEQ ID NO: 8142 - protein, 432 aa, synthetic construct
AQIEEFVHVERISMLMEMILSRENLLAALKRVEQNKGSHGVDGMSVKDLRRHLYENWDSIRQSLREGTYKPLPVRRVEIPKPNGGVRLLGIPTVTDRFIQQAIAQVLTKIFDPTFSNHSYGFRPGRRGHDAVREAKGYIKEGYRWVVDIDLEKFFDKVNHDKLMGILAKTIKDQILLKVIRRYLQSGVMINGVVMETDMGTPQGGPLSPLLSNIMLHELDKELEKRGHKFVRYADDCNIYVKTKKAGIRVMNSITNFIEKELKLKVNKEKSAVDRPWKRKFLGFSFTLNKTPKVRIANESVKRLKNKIREITSRSKPYPMEKRIEKLNKYLMGWCGYFALAETPSKFKELDEWIRRRLRMCLWKEWKTPKTRIRKLRGLGVPSHKAFEWGNTRKKYWRIACSPILHKTLDNSYWKRRGLRSLFERYQALRHT

SEQ ID NO: 8143 - protein, 418 aa, synthetic construct
LMDLILSRENLIAALKRVERNKGSHGIDGMSVKSLRRHLYENWDSLCDSLRKGTYQPNPVRRIEIPKPNGGVRLLGIPTVTDRFIQQAIAQILTPLFDPSFSEHSYGFRPNRRGHDAVRKAREYISEGYRWVIDMDLEKFFDKVNHDKLMGILASRIQDRLVLKLIRKYLQAGIMINGVVYDAEEGTPQGGPLSPLLSNILLDKLDKELERRGHKFVRYADDCNIYMKSKKAGERVMNSITRFIEQKLKLKVNRGKSAVDRPWKRKFLGFSFTLNKKPKVRIANESIKRLKTKIREFTSRSKSIPMEVRIEKLNQYLTGWCGYFALADTPSKFKEFDEWIRRRLRMIEWKQWKNPRTRVRKLKGLGVPDQKAYEWGNSRRKYWRIASSPILHKTLDNSYWSNRGLKSLYQRYEFLRQT

SEQ ID NO: 8144 - protein, 462 aa, synthetic construct
RSHEGQRQQKISRESLRQREAVKPSGYAGAPSSSSAQIDPSSREANNDLLERMLRGDNLRLAYKRVVQNGGAPGVDNVTVANLQAYLKTHWEAVKTELLAGTYRPMPVKRVEIPKPGGGVRLLGIPTVMDRFLQQALLQVMTPIFDADFSRHSYGFRPGKRAHDAVKQAQRYMQEGFRWVVDMDLAKFFDRVNHDMLMARVARKVTDKCVLKLIRAYLNAGVMANGVTEKTGEGTPQGGPLSPLLANILLDDLDKELTERGLRFVRYADDCNIFVASKRAGERVMDSVTRFVEGKLKLKVNREKSAVDRPWNRKFLGFSFLRDKKATIRLAPQTISRFKEKVRELTNRTRSMSMENRIAQLNRYLMGWIGYFRLASAKGHCEKFDQWIRRRLRMCLWKQWKRVRTRIRELRALGVPEWACFVMANSRRGAWEMSRNTNNALPTSYWEAKGLKSLLSRYLELC

SEQ ID NO: 8145 - protein, 467 aa, synthetic construct
SSNELHRKQKTHSRASLREIAVNTQRTAKGQSISSAQTRISPCKDQGNNLMEKVVERSNMMAALRRVEQNKGAAGIDGVKTDELRNLLWDIWTDTKEQLLTGTYRPKPVRRVEIPKPNGGVRLLGIPTVLDRLIQQALLQILTSIFDPTFSEASYGFRPGKRAHTAVRVARSYVESGYDWVIDMDIEKFFDRVNHDILMARVARKVKDKRVLKLIRRYLQAGVMLGGVVVRTEEGTPQGGPLSPLLANIYLDDLDKELEKRGHKFVRYADDCNIYVKSQRAAERVMQSIREFLQKRLKLKVNEEKSCVDRPWNLKYLGFSMFKSKGKVRICLAPETIKRVKNKIREFTSRSKPIRMEDRIRRLNAYLGGWLGYFALADTSNDFASIDGWLRRRLRMCLWRQWDRVRTRLRELRALGLPEWVAHQLANTRKGPWRMSHRPLHSALNNAYWEKQGLLSLAKRHQAICQA

SEQ ID NO: 8146 - protein, 438 aa, synthetic construct
SPANRAVIDEQMDKWMKLDVIEPSKSPWAAPVFIVYRNAKPRMVIDLRKLNESVVPDEHPIPRQEEILQSLQGCKYLSSLDALAGFTQLSIHEDDREKLAFRTHRGLFQFKRMPFGYRNGPAVFQRVMQNVLSPYLWLFTLVYIDDIVIYSKTFDEHLAHVDLVLKAIMESKLTLSPDKCHFGYGSILLLGQKVSRLGLSTHKEKVQSILDLETPKNVKTLQTFLGMMVYFSSYIPFYSWIAHPLFQLLKKGTKWEWKAEHQNAFELCKEVLTEAPVRAHAMPGRPYRVYSDACDFGLAAILQQVQPVEIRDLRGTRTYDRLRKAFDKGEKVPVLAQTISKDVKDVPEDVWASDFESTTVHIERVIAYWSRVLQSAERNYSPTEREALALKEGLVKFQVYLEGEKVLAITDHAALQWSRTFQNVNRRLLSWGLVFSAF

SEQ ID NO: 8147 - protein, 333 aa, synthetic construct
SSGSSYFYKERRGKIYESYYGSIVTYNTTTSKMADSKELFSSFFKARMSLKKEFPYDEIAIKLFEYNLEDNINRFSKEILKGYKFNTDFIGYKVPKNEKDDRQKVMDNIFNTIAGASFLDIIGIVIDREFSSNCCGNRLNKKLNTEYSYEYFWYGWYYKFMKKAFNKVLNKNNYYLKLDIKSFYTNINQNILYDKIIKLIPYKDSRLKEFINSLIKRHIPYVNNGKGLPQGSLTSGFLANLYLDDFDKYFISKTNDGYMRYVDDIFIFGKTEEQIKELGKEAENKLKDLYLEINKEKTSMGDKSSLKNIYYDDKELDDFQKRLSGGSKRTADG

SEQ ID NO: 8148 - protein, 262 aa, synthetic construct
SSGSLRINSLKHLAHRLGFAPEVLQKAASRAEKSYKFDKIPKKSGKGFREISKPNALLKNIQKAIHKLLTEIEISDNAHCGIKKRSNVTNAMNHCNKEWVYSMDFKNFFPNISHHQVYGLFRYELKCSPDVTSILTRLCTVKGGVPQGGSMSMDIANLVSRKLDTRLEGLCKIHNLSYTRHCDDLNFSGKRILDTFRAKVEIIIKESGFPLNPDKETLIPHHHPQSVVGLRVNRKKPCVPRKTRREWRKEKHSGGSKRTADG

SEQ ID NO: 8149 - protein, 298 aa, synthetic construct
IPNVVWKECVELLAPQLERIFKAVYEKGMYSERWKEWTTVVLKKPGKPRYDTPKAWRPIALMNTMGKILTALLTEDLKYVTEKYSLLPNTHFGGRPGRTTTDAIQLLTSWIKGHWRKGNVVSVLFLDIEGAFPNVVVSRLAHNMRRRRVPEFIVKLIEHQLRDRRTKLKFDDYESEWVPIDNGSGQGDPKSMLEYLFYNADLIDLVAGLGEELEEGENGEDAPRGSARERGTEKRDENAAAFVDDAWLGGAGATFEEANETLKDMMNRRGGAMEWSKKHNSKFEISKLVYMGFTRRMR

SEQ ID NO: 8150 - protein, 319 aa, synthetic construct
KSAEYLNTFRLRNLGLPVMNNLHDMSKATRISVETLRLLIYTADFRYRIYTVEKKGPEKRMRTIYQPSRELKALQGWVLRNILDKLSSSPFSIGFEKHQSILNNATPHIGANFILNIDLEDFFPSLTANKVFGVFHSLGYNRLISSVLTKICCYKNLLPQGAPSSPKLANLICSKLDYRIQGYAGSRGLIYTRYADDLTLSAQSMKKVVKARDFLFSIIPSEGLVINSKKTCISGPRSQRKVTGLVISQEKVGIGREKYKEIRAKIHHIFCGKSSEIEHVRGWLSFILSVDSKSHRRLIAYISKLEKKYGKNPLNKAKT

SEQ ID NO: 8151 - protein, 298 aa, synthetic construct
ITPLVSFTSFAQFEQALRDSRVSAHSGASFSNSLEVDRLVKSARELYGRGLPPIVSSRTFSLLFGVSPRLISAMTKSPEKYWRTFEIKKRSGKGRNIAAPRVFLKTVQRFLLRFVLEKIPIHPNAFGFAPGKGIFKHAERHLKARFVLTLDIADFFPSISWTQVRDIFANIGFPDGVPSLLADLCTRNKVFPQGAPTSPYLSNLIFLKTDEALTEAANQFEMRYSRYADDLTFSCDSQPSDEARLAFEQIIRDAGFRIQHSKTRLRGPSQAREVTGLLVNEKIQPSRHTRRLLRAKFH

SEQ ID NO: 8152 - protein, 691 aa, synthetic construct
SLQLEEEYRLYQEREKPPEELQEWLLRFPQAWAETGGTGMARQAPPVVIELKSGATPIGVRQYPMSKEAREGIRPHIKRLLEQGILVPCRSPWNTPLLPVKKPGTNDYRPVQDLREVNKRVQDVHPTVPNPYNLLSTLPPTRTWYTVLDLKDAFFCLRLHPNSQPLFAFEWRDPESGRTGQLTWTRLPQGFKNSPTLFDEALHRDLAPFRANNPQVTLIIYIDDILLATETREDCELGTQKILAELGELGYRVSAKKAQLCRTEVTYLGYTLKNGQRWLTEARKRTVTQIPTPTTPRQVREFLGTAGFCRLWIPGFATLAAPLYPLTKEKGKFIWTKEHQVAFETLKKTLLQAPALALPDLSKPFTLYIDERKGVARGVLTQALGPWKRPVAYLSKKLDPVASGWPSCLRAIAATATLIKDADKLTLGQKVTVVAPHALENIIRQPPDRWITNARITHYQSLLLTERVTFAPPAVLNPATLLPEADETPVHQCEEILAEEAGTWSDLTDQPWPGAETWFTNGSSFVKKGKRRAGAAVVDRRTVIWASSLPEGTSAQKAELIALIQALKLAEGKSVNIYTDSRYAFATAHVHGAIYRQRGLLTSAGRDIKNKKEILDLLVAIHLPRKVAIIHCPGHQKGTGPIEKGNQMADQMAKEAAHGPMTLIAKVGSRQDERALEKRALTEEEGLEYLT

SEQ ID NO: 8153 - protein, 673 aa, synthetic construct
VLNLEEEYRLHEKPVPSSIDPSWLQLFPTVWAERAGMGLANQVPPVVVELRSGASPVAVRQYPMSKEAREGIRPHIQRFLDLGVLVPCQSPWNTPLLPVKKPGTNDYRPVQDLREINKRVQDIHPTVPNPYNLLSSLPPSHTWYSVLDLKDAFFCLKLHPNSQPLFAFEWRDPEKGNTGQLTWTRLPQGFKNSPTLFDEALHRDLAPFRALNPQVVLLQYVDDLLVAAPTYRDCKEGTQKLLQELSKLGYRVSAKKAQLCQKEVTYLGYLLKEGKRWLTPARKATVMKIPPPTTPRQVREFLGTAGFCRLWIPGFASLAAPLYPLTKESIPFIWTEEHQKAFDRIKEALLSAPALALPDLTKPFTLYVDERAGVARGVLTQTLGPWRRPVAYLSKKLDPVASGWPTCLKAVAAVALLLKDADKLTLGQNVTVIASHSLESIVRQPPDRWMTNARMTHYQSLLLNERVSFAPPAVLNPATLLPVESEATPVHRCSEILAEETGTRRDLKDQPLPGVPAWYTDGSSFIAEGKRRAGAAIVDGKRTVWASSLPEGTSAQKAELVALTQALRLAEGKDINIYTDSRYAFATAHIHGAIYKQRGLLTSAGKDIKNKEEILALLEAIHLPKRVAIIHCPGHQKGNDPVATGNRRADEAAKQAALSTRVLAETTKPQELI

SEQ ID NO: 8154 - protein, 725 aa, synthetic construct
ALSLEEEYRLFEAEPPEKSPEELQNWLREFPQAWAETAGLGLARDQPPLMISLKASATPVSIRQYPMSREAHEGIKPHIRRLLDQGVLKPCQSPWNTPLLPVKKPGTGDYRPVQDLREVNKRVEDIHPTVPNPYNLLSTLPPTHVWYTVLDLKDAFFCLRLHPQSQLLFAFEWRDPEKGSSGQLTWTRLPQGFKNSPTLFDEALHADLAGFRVEHPTLTLLQYMDDLLLVARSRTECMEGTRALLARLGQKGYRASAKKAQVCRDKVTYLGYTLSRGQRWLTGARKETIISIPPPRNPRQVREFLGTAGYCRLWIPGFAKLAAPLYPLTKPGTMFQWEEKHQKAFQQIKKALLEAPALGLPDLTKPFELFVDENSGFAKGVLVQRLGPWRRPVAYLSKKLDPVATGWPPCLRMVAAIAVLLKDAGKLTLGQPLTVLASHAVEALVRQPPDRWLSNARMTYYQALLLDSDRVNFGPIVSLNPATLLPLPSPSEEHDCLQILAEAHGTRPDLTDQPLKDPDAVWYTDGSSFLEEGERRAGAAITTESEVVWASSLPPGTSAQRAELIALTQALRMAEGKKLTVYTDSRYAFATAHVHGEIYRRRGLLTSAGKEIKNKKEILDLLKALFLPLQLSIVHCPGHQKDDSAVARGNRLADLTARTVASQPAGSSQLMAIQEPQPERDPVPYSPEDHELAKKMGSDWEQRRQAYILGDRMVMSTSHTRYMLR

SEQ ID NO: 8155 - protein, 604 aa, synthetic construct
TLKLEDEYKLHDDPRPTPENIDQWLAKYPEAWAETNGMGLAKQQPPLVISLKASVTPANVKQYPMTIEAQQGIRPHIKRLLEQGILIPCQSAWNTPLLPVKKPGGTDYRPVQDLREVNKRVEDIHPTVPNPYNLLSTLPPSHAWYTVLDLKDAFFCLKLHPSSQPLFAFEWKDPELGLSGQLTWTRLPQGFKNSPTLFDGALHQDLAAFRTQYPHLIILQYVDDILLAAETKEECLEGTGALLQELGQLGYRASAKKAQLCKKEVTYLGYQLKEGQRWLTKARQQTILSIPAPKDRKQVREFLGTAGFCRLWIPGFAEMAAPLYPLTKASEGFTWENEHQRAFENIKQALLTAPALGLPDLNKPFELYVDEKTGYAKGVLTQKLGPWRRPVAYLSKKLDPVASGWPPCLRMVAALAVLVKDAFKLTLGQPLCIRAPHALESLIRQPPDRWLSNTRMTHYQALLLDTDRIQFGSPVALNPATLLPSTEEPDHHDCLQILAEVFGTRPDLKDQPLDNADYTWYTDGSSFLKGSQRRAGAAVTSKDKVIWAKPLPEGTSAQKAELIALTQALRLAEGKSLNVYTDSRYAFATAHIHGEIYRRRGLDL

SEQ ID NO: 8156 - protein, 680 aa, synthetic construct
TCPLSEESRLLPLTFSPDRPSTTSTPTSLTLLNHFKGLVPGVWAETNPFGLAGHQPPVVVQLSSTATPACVQQYPLTRAALLGIKPHIDRLLAAGILRPCQSSWNTPLLPVRKPGSGDFRPVQDLREVNARVETVHPTVPNPYTLLSSLDPARTWYTVLDLKDAFFSIPLAPVSQPIFAFTWTDPNTGTSSQLTWTRLPQGFKNSPTLFGSALASDLAAFRVSYPEVTLLQYVDDLLLATSSEAICKDATLHLLQLLEASGYRISGKKAQLCSQSVVYLGFTLRSGQRLLSRGRVAAILGMPAPRNRRGLREFLGMAGYCRLWILGFAEVAKPLYEALTGEPTQFVWGPRQQEAFDKLRKALSSTPALSLPDLSKPFRLYVSESRAVAKGVLTQPLGPWNRPVAYLSKQLDPVASGWPSCLRTVAAIAVLVREAAKLTFGQPLEISASHHLEQLLHSPPTRWISNSRLTHYQSLLLDSARISFAPPVTLNPATLLPDSPPSSPIHDCLDTLDSIHTSRPGLTDVPLTNPDLVLFTDGSSFVQEGIRRAGAAVVTPVETLWDTALPPGTSAQRAELIALTQALRLSAGRRVNIYTDSRYAFATVHIHGYVYLQRGLLTSAGREIRNKSQIQDLLDAVWLPKEVAVIHVPAHTRGTDPQSLGNAAADKAARAAACKPLIPAM

SEQ ID NO: 8157 - protein, 679 aa, synthetic construct
TAPLEEEYRLFLEAPIQNVTLLEQWKREIPKVWAEINPPGLASTQAPIHVQLLSTALPVRVRQYPITLEARRSLRETIRKFRAAGILRPVHSPWNTPLLPVRKPGTSEYRMVQDLREVNKRVETIHPTVPNPYTLLSLLPPDRTWYSVLDLKDAFFCIPLAPKSQLIFAFEWTDAEEGESGQLTWTRLPQGFKNSPTLFDEALNRDLQGFRLDHPSVSLLQYVDDLLIAADTQAACLSATRDLLMTLAELGYRVSGKKAQLCQEEVTYLGFKIHKGSRTLSNSRTQAILQIPVPKTKRQVREFLGTIGYCRLWIPGFAELAQPLYAATRGGNDPLEWGEKEEEAFQSLKLALTQPPALALPSLDKPFQLFIEETGGAAKGVLTQALGPWKRPVAYLSKRLDPVAAGWPRCLRAIAAAALLTREASKLTFGQDIEITSSHNLESLLRSPPDRWLTNARITQYQVLLLDPPRVRFKQTAALNPATLLPETDDTLPIHHCLDTLDSLTSTRPDLTDQPLAQAEATLFTDGSSYIPHGKRYAGAAVVTLDSVIWAEPLPIGTSAQKAELIALTKALEWSKDKSVNIYTDSRYAFATLHVHGMIYKERGLLTAGGKAIKNAPEILALLTAVWLPKRVAVMHCRGHQKDDAPTSAGNRRADEVAREVAIRPLSIQATVFDAPDMP

SEQ ID NO: 8158 - protein, 665 aa, synthetic construct
TVLLPPTYHKQLSCQTKNTLNIDEYLLQFPDQLWASLPTDIGRMLVPPITIKIKDNASLPSIRQYPLPKDKTEGLRPLISSLENQGILIKCHSPCNTPIFPIKKAGRDEYRMIHDLRAINNIVAPLTAVVASPTTVLSNLAPSLHWFTVIDLSNAFFSVPIHKDSQYLFAFTFEGHQYTWTVLPQGFIHSPTLFSQALYQSLHKIKFKISSEICIYMDDVLIASKDRDTNLKDTAVMLQHLASEGHKVSKKKLQLCQQEVVYLGQLLTPEGRKILPDRKVTVSQFQQPTTIRQIRAFLGLVGYCRHWIPEFSIHSKFLEKQLKKDTAEPFQLDDQQVEAFNKLKHAITTAPVLVVPDPAKPFQLYTSHSEHASIAVLTQKHAGRTRPIAFLSSKFDAIESGLPPCLKACASIHRSLTQADSFILGAPLIIYTTHAICTLLQRDRSQLVTASRFSKWEADLLRPELTFVACSAVSPAHLYMQSCENNIPPHDCVLLTHTISRPRPDLSDLPIPDPDMTLFSDGSYTTGRGGAAVVMHRPVTDDFIIIHQQPGGASAQTAELLALAAACHLATDKTVNIYTDSRYAYGVVHDFGHLWMHRGFVTSAGTPIKNHKEIEYLLKQIMKPKQVSVIKIEAHTKGVSMEVRGNAAADEAAKNAVFLVQRVLK

SEQ ID NO: 8159 - protein, 671 aa, synthetic construct
TTLVPLQEYEERLLKQTMLTGSYKEKLQSLFLKYDALWQHWENQVGHRRIKPHHIATGTVNPRPQKQYPINPKAKASIQTVINDLLKQGVLIQQNSIMNTPVYPVPKPDGKWRMVLDYREVNKTIPLIAAQNQHSAGILSSIFRGKYKTTLDLSNGFWAHSITPESYWLTAFTWLGQQYCWTRLPQGFLNSPALFTADVVDLLKEVPNVQVYVDDIYISHDDPREHLEQLEKVFSLLLNAGYVVSLKKSEIAQHEVEFLGFNITKEGRGLTETFKQKLLNITPPRDLKQLQSILGLLNFARNFIPNFSELVKPLYNIIATANGKYITWTTDNSQQLQNIISMLNSAENLEERNPEVRLIMKVNTSPSAGYIRFYNEFAKRPIMYLNYVYTKAEVKFTNTEKLLTTIHKGLIKALDLGMGQEILVYSPIVSMTKIQKTPLPERKALPIRWITWMSYLEDPRIQFHYDKTLPELQQVPTVTDDIIAKIKHPSEFSMVFYTDGSAIKHPNVNKSHNAGMGIAQVQFKPEFTVINTWSIPLGDHTAQLAEVAAVEFACKKALKIDGPVLIVTDSFYVAESVNKELPYWQSNGFFNNKKKPLKHVSKWKSIADCIQLKPDIIIIHEKGHQPTASTFHTEGNNLADKLATQGSYVVNINTTPSLDAELDQLLQGQYP

SEQ ID NO: 8160 - protein, 671 aa, synthetic construct
TTLVPLQEYQERLLKQTALPEREKKILHSLFLKYDALWQHWENQVGHRRIKPHHIATGTVNPRPQKQYPINPKAKPSIQIVINDLLKQGVLIQQNSVMNTPVYPVPKPDGKWRMVLDYREVNKTIPLIAAQNQHSAGILSSIVREKYKTTLDLSNGFWAHSITPESYWLTAFTWQGKQYCWTRLPQGFLNSPALFTADVVDLLKEVPNVQAYVDDIYISHNDPKEHLEQLEKVFSLLLNAGYVVSLKKSEIAQYEVEFLGFNITKEGRGLTDTFKQKLLNITPPKDLKQLQSILGLLNFARNFIPNFSELVKPLYNIIAIANGKFIQWTEENSQQLQYIISVLNSAENLEERNPEVKLIMKVNTSPSAGYIRFYNESAKRPIMYLNYVYTKAEIKFTNTEKLLTTIHKGLIKALDLAMGQGILVYSPIVSMTKIQRTPLPERKALPIRWITWMSYLEDPRIQFHYDKTLPELQNVPMVTGDEVAKTKHPSEFSMVFYTDGSAIKHPNINKSHSAGMGIAQVQFKPEFTVLNTWSIPLGDHTAQLAEVAAVEFACKKALKINGPVLIVTDSFYVAESANKELPYWQSNGFLNNKKKPLRHISKWKSIAECIQLKPDISIIHEKGHQPTATTFHTEGNTLADKLATQGSYVVNSNTTPSLDAELDQLLQGRYP

SEQ ID NO: 8161 - protein, 671 aa, synthetic construct
TVLVPLQDYQERLLKQTTLPKEQKDQLEKLFLKYDALWQHWENQVGHRRIKPHNIATGTLAPRPQKQYPINPKAKPSIQIVIDDLLKQGVLIQQNSTMNTPVYPVPKPDGKWRMVLDYREVNKTIPLIAAQNQHSAGILSSIYRGKYKTTLDLTNGFWAHPITPESYWLTAFTWQGKQYCWTRLPQGFLNSPALFTADVVDLLKEVPNVQAYVDDIYMSHDDPQEHLEQLEKVFSILLNAGYVVSLKKSEIAQREVEFLGFNITKEGRGLTETFKQKLLNVIPPKDLKQLQSILGLLNFARNFIPNYSELVKPLYTIVANANGKFISWTEENSNQLQYIISVLNQADNLEERNPETRLILKVNSSPSAGYIRYYNEGSKRPIMYVNYVFSKAEVKFTQTEKMLTTMHKGLIKAMDLAMGQEILVYSPIVSMTKIQKTPLPERKALPVRWITWMTYLEDPRIQFHYDKTLPELQQTPSVTEDVIAKTKHPSEFAMVFYTDGSAIKHPDINKSHSAGMGIAQVQFQPEYKVIHQWSIPLGDHTAQLAEIAAVEFACKKALKISGPVLIVTDSFYVAESANKELSYWKSNGFLNNKKKPLKHVSKWKSIAECLQLKPDITIIHEKGHQQPMTTLHTEGNNLADKLATQGSYVVHCNTTPSLDAELDQLLQGHNP

SEQ ID NO: 8162 - protein, 671 aa, synthetic construct
TVLVPLHEYQERLLQQTALPKEQKELLQKLFLKYDALWQHWENQVGHRRIKPHNIATGTLAPRPQKQYPINPKAKPSIQIVIDDLLKQGVLIQQNSTMNTPVYPVPKPDGKWRMVLDYREVNKTIPLIAAQNQHSAGILSSIYRGKYKTTLDLTNGFWAHPITPESYWLTAFTWQGKQYCWTRLPQGFLNSPALFTADVVDLLKEIPNVQAYVDDIYISHDDPQEHLEQLEKIFSILLNAGYVVSLKKSEIAQREVEFLGFNITKEGRGLTDTFKQKLLNITPPKDLKQLQSILGLLNFARNFIPNYSELVKPLYTIVANANGKFISWTEDNSNQLQHIISVLNQADNLEERNPETRLIIKVNSSPSAGYIRYYNEGSKRPIMYVNYIFSKAEAKFTQTEKLLTTMHKGLIKAMDLAMGQEILVYSPIVSMTKIQRTPLPERKALPVRWITWMTYLEDPRIQFHYDKSLPELQQIPNVTEDVIAKTKHPSEFAMVFYTDGSAIKHPDVNKSHSAGMGIAQVQFIPEYKIVHQWSIPLGDHTAQLAEIAAVEFACKKALKISGPVLIVTDSFYVAESANKELPYWKSNGFLNNKKKPLRHVSKWKSIAECLQLKPDIIIMHEKGHQQPMTTLHTEGNNLADKLATQGSYVVHCNTTPSLDAELDQLLQGHYP

SEQ ID NO: 8163 - protein, 671 aa, synthetic construct
TVLVPLQEYQERLLKHTALPKEQVKQLEKLFLKFDALWQHWENQVGHRRIKPHNIATGILTPRPQKQYPINPKAKPSIQIVIDDLLKQGVLIQQNSIMNTPVYPVPKPDGKWRMVLDYREVNKTIPLIAAQNQHSAGILSSIYRGKYKTTLDLTNGFWAHPITPESYWLTAFTWQGKQYCWTRLPQGFLNSPALFTADVVDLLKEVQNVQAYVDDIYISHDDPQEHVEQLEKVFSILLNAGYVVSLKKSEIAQREVEFLGFNITKEGRGLTDTFKQKLLNITPPKDLKQLQSILGLLNFARNFIPNYSELVKPLYTIVANANGKFITWSEENSNQLQRIISVLNQAENLEERNPETRLIIKINSSPSAGYIRYYNEGSKRPIMYVNYVFSKAEMKFTHTEKLLTTMHKGLIKAMDLAMGQEILVYSPIVSMTKIQKTPLPERKALPVRWITWMTYLEDPRIQFHYDKSLPELQQIPNVTEDVIAKTKHPSEFSMVFYTDGSAIKHPDVNKSHSAGMGIAQAQFQPEYKVLHQWSIPLGDHTAQLAEIAAVEFACKKALKVSGPVLIVTDSFYVAESANKELSYWKSNGFLNNKKKPLKHVSKWKSIAECLQLKPDIVIIHEKGHQPSMTTLHTEGNNLADKLATQGSYVVHCNTTPSLDAELDQLLQGHNP

SEQ ID NO: 8164 - protein, 672 aa, synthetic construct
TILVPLQEYQDRILNKTALPEEQKQQLKALFTKYDNLWQHWENQVGHRKIRPHNIATGDYPPRPQKQYPINPKAKPSIQIVIDDLLKQGVLTPQNSTMNTPVYPVPKPDGRWRMVLDYREVNKTIPLTAAQNQHSAGILATIVRQKYKTTLDLANGFWAHPITPDSYWLTAFTWQGKQYCWTRLPQGFLNSPALFTADAVDLLKEVPNVQVYVDDIYLSHDNPHEHIQQLEKVFQILLQAGYVVSLKKSEIGQRTVEFLGFNITKEGRGLTDTFKTKLLNVTPPKDLKQLQSILGLLNFARNFIPNFAELVQTLYNLIASSKGKYIEWTEDNTKQLNKVIEALNTASNLEERLPDQRLVIKVNTSPSAGYVRYYNESGKKPIMYLNYVFSKAELKFSMLEKLLTTMHKALIKAMDLAMGQEILVYSPIVSMTKIQKTPLPERKALPIRWITWMTYLEDPRIQFHYDKTLPELKHIPDVYTSSIPPLKHPSQYEGVFCTDGSAIKSPDPTKSNNAGMGIVHAIYNPEYKILNQWSIPLGHHTAQMAEIAAVEFACKKALKVPGPVLVITDSFYVAESANKELPYWKSNGFVNNKKEPLKHISKWKSIAECLSIKPDITIQHEKGHQPINTSIHTEGNALADKLATQGSYVVNCNTKKPNLDAELDQLLQGNNV

SEQ ID NO: 8165 - protein, 671 aa, synthetic construct
TVLVPLEQYKERILKETALEGQFKQQLQNILSTFDTLWQHWENQVGHRKIPPHNIATGTHPPRPQKQYPINPKAKESIQIVINDLLKQGVLIQQNSIMNTPVYPVPKPDGRWRMVLDYREVNKTIPLIAAQNQHSAGILASIYRGTYKTTLDLANGFWAHPITPNSYWLTAFTWQGKQHCWTRLPQGFLNSPALFTADVVDLMKHIPNVQVYVDDLYLSHDDPQEHLQVLQQVLHILHDAGYVVSLKKSAIAQKVVEFLGFNITKTGRGLTDAFKEKLLNISPPQNLKQLQSILGLMNFARNFIPNYAERVKPFYSLISTAKSNNILWNDELTSQLQELITLLNQADNLEERKPTTRLIIKVNSSSHAGYIRYYNEGSKKPILYINYVFSKAEEKFSMLEKLLTTLHKALIKAVDLAMGTEIMVYSPIVSMTKIQKTPLPERKALPVRWITWMTYLEDPRITFHYDKTLPELKDVPSVYQNDIPIVPHPSQYSMVFYTDGSAIKNPNPTKTHSAGMGVVQGKFNPEFQVVNQWSIPLGNHTAQLAEVAAVEFACKQALKITGPVLIITDSFYVAESANKELPYWKSNGFVNNKKKPLKHVSKWKSIADCLSLKTGITIKHEKGHQPSHTSVHTEGNALADKLATQGSYVVNNIIKPSLDAELDQVLQGNLP

SEQ ID NO: 8166 - protein, 672 aa, synthetic construct
TIRVPIEEYKERIIQQSTLPRDYKDKLRTLLEKYNILWQHWENQVGHRRIFPHNIATGTCKPKPQRQYPINPKARASIQVVIDDLLKQGVLIKQTSVMNTPVYPVPKPDGRWRMVLDYREVNKTIPLIGAQNQHSLGLLTTLVREKYKTTLDLANGFWAHPITPESYWITAFTWQGLQYCWTRLPQGFLNSPALFTADVVDLLKEIPNVQVYVDDLYISHEDPQEHLDVLDKIFQKLKDAGYVVSLKKSEIAQSTVEFLGFNITKEGRGLTESFKTKLLDLKPPETLKQLQSILGLLNFARNFVSNFSELVKPLYQLISTAKGNNISWSNENTKQLQQLISALNNADNLEERKPDVKLIVKLNASPSAGYIRFYNETGKKPIMYINYVFTKAEIKFSPLEKLLVTLHKALIKALDIAMGKEILVYSPIVSMTKIQKTPLPERKALPIRWITWMTYLEDPRISFYYDKTLPELKLVPEVQEKEKIIASRHPSQYTSVFYTDGSAIRSPDVSKAHSAGMGVVQGYFDPEFKISNSWSVPLGDHTAQYAEVCAVEFACKKALSVSGPVLIITDSFYVAESATKELPYWRSNGFLTNKKKPLKHVSKWKVIADCLQSKPDIVILHEKGHQPNNTSIHTEGNALADKLATQGSYTVNNIQNPSLDAELDQILQGNFP

SEQ ID NO: 8167 - protein, 672 aa, synthetic construct
TVKLPVQDFKKELINKANINNEEKKQLAKLLDKYDILWQQWENQVGHRKIPPHNIATGTVAPRPQRQYHINTKAKPSIQQVIDDLLKQGVLVKQTSVMNTPVYPVPKPDGKWRMVLDYRAVNKTIPLIGAQNQHSLGILTNLVRQKYKSTIDLSNGFWAHPITKDSQWITAFTWEGKQHVWTRLPQGFLNSPALFTADVVDLLKDIPGISVYVDDIYFSTETVSEHLKILEKVFKILLEAGYIVSLKKSALLRHEVTFLGFSITQTGRGLTSEFKDKIQNITPPKTLKELQSILGLFNFARNFVPNFSEIIKPLYSLISTAEGNNIKWTSEHTRHLEEIVSALNHAGNLEQRDDESPLVVKLNASPKTGYIRYYNKGGQKPIAYASHVFTNTESKFTPLEKLLVTMHKALIKAIDLALGQPIEVYSPIVSMQKLQKTPLPERKALSTRWITWLSYLEDPRIIFHYDKTLPDLKNVPETITEKQPKILPIIEYAAVFYTDGSAIRSPDKNKSHSSGMGIVQAIFKPELTIEHQWTIPLGDHTAQYAEISAVEFACKKANNISGPVLIVTDSDYVARSVNEELPFWRSNGFVNNKKKPLKHISKWKNISDSLLLKRDITIVHEPGHQPSHTSIHTQGNNLADKLATQGSYNVNSIVKNPSLDAELEQLINGHSM

SEQ ID NO: 8168 - protein, 672 aa, synthetic construct
TIKLPVQDLKNTLVSQANIGKEDKIKLAKLLDKYDDLWQQWDNQVGNRKITPHNIATGTYPPKPQKQYHINPKAKPSIQIVINDLLKQGVLRQSTSPMNTPVYPVPKPDGKWRMVLDYRAVNKTIPLIAAQNQHSLGILTNLIRHKYKSTIDLSNGFWAHPITEDSQWITAFTWEGKQHVWTRLPQGFLNSPALFTADVVDILKEVPGVSVYVDDIYISSPTMEEHFQVLDSIFRKLLETGYIVSLKKSALARYEVNFLGFVISETGRGLTSEFRERLQEITPPTTLKQLQSILGFLNFARNFVPNFSELVQPLYQLISTASGNFIQWTAEHTLRLNELISALNHAGNLEQRRGDSPLVVKVNASDKTGYIRYYNDNSLIPIAYASHVFSTAELKFTPLEKLLVTMHRALLKGIDLALGQPIKVYSPIASMQKLQKTPIPERKALSTRWVTWLSYLEDPRITFYYDKTLPDLKHVPASTDNNIITLLPITEYEAVFYTDGSAIKSPKTEQTHSAGMGIVMVVYTPEPNITQQWSIPLGDHTAQYAEISAVEFACKKASLLQGPVLIVTDSDYVARSANKELPFWRSNGFLNNKKKPLKHISKWKNISDSLLLKRNITIVHEPGHQPSKTSIHTLGNSLADKLAVQGSYSVNTINKIPSLDAELNQILEGNLP

SEQ ID NO: 8169 - protein, 670 aa, synthetic construct
TIKLPVQEQKDSLVSQANIKKEDKIKLAKLLDKYDALWQNWENQVGNRKITPHNIATGTEPPRPQKQYHINPKAKPSIQIVINDLLKQGVLKQVTSPMNTPVYPVPKPDGKWRMVLDYRAVNKTIPLIAAQNQHSLGILTNLVRHKYKSTIDLSNGFWAHPITSDSQWITAFTWEGKQHVWTRLPQGFLNSPALFTADVVDILKEIPNVSVYVDDIYFSSPTVEEHLDTLEKIFDKLLQAGYIVSLKKSALARYEVNFLGFAISETGRGLTSEFKERLQEITPPTTIKQLQSIMGFLNFARNFIPNFSELVQPLYQLIATASGNFIHWTTEHTLRLREIISALNHAGNLEQRVGDSPLVIKVNASDRTGYIRYYNDGSIVPIAYASHVFSSAEQKFTPTEKLLVTMHRALLKGLDLALGQPIRVYSPVASMQKLQKTPLPERKALSTRWVTWLSYLEDPRITFFYDKSLPDIKTFLPQLLLNAYMLPITQYEAVFYTDGSAIKAPKLTQAHSAGMGIVMVIFNPEPTVKQQWSIPLGDHTAQYAEISAVEFACKKASLLTGPVLIVTDSDYVARSANDELPFWRSNGFLNNKKKPLKHISKWKNISDSLLLKRNITIVHEPGHQPSKTSIHTFGNSLADKLAVQGSYTVNTVHTPSLDAELNQILNKDFP

SEQ ID NO: 8170 - protein, 676 aa, synthetic construct
TIKLDLEEQQGTLLNNSILSKKGKEELKQLFEKYSALWQSWENQVGHRRIRPHKIATGTVKPTPQKQYHINPKAKPDIQIVINDLLKQGVLIQKESTMNTPVYPVPKPNGRWRMVLDYRAVNKVTPLIAVQNQHSYGILGSLFKGRYKTTIDLSNGFWAHPIVPEDYWITAFTWQGKQYCWTVLPQGFLNSPGLFTGDVVDLLQGIPNVEVYVDDVYISHDSEKEHLEYLDILFNRLKEAGYIISLKKSNIANSIVDFLGFQITNEGRGLTDTFKEKLENITAPTTLKQLQSILGLLNFARNFIPDFTELIAPLYALIPKSTKNYVPWQIEHSTTLETLITKLNGAEYLQGRKGDKTLIMKVNASYTTGYIRYYNEGEKKPISYVSIVFSKTELKFTELEKLLTTVHKGLLKALDLSMGQNIHVYSPIVSMQNIQKTPQTAKKALASRWLSWLSYLEDPRIRFFYDPQMPALKDLPAVDTGKDNKKHPSNFQHIFYTDGSAITSPTKEGHLNAGMGIVYFINKDGNLQKQQEWSISLGNHTAQFAEIAAFEFALKKCLPLGGNILVVTDSNYVAKAYNEELDVWASNGFVNNRKKPLKHISKWKSVADLKRLRPDVVVTHEPGHQKLDSSPHAYGNNLADQLATQASFKVHMTKNPKLDIEQIKAIQACQNNERLP

SEQ ID NO: 8171 - protein, 671 aa, synthetic construct
TTLVPLQEYQERLLKQTALPNKEKTMLQSLFLRYDALWQHWENQVGHRRIKPHHIATGTVPPRPQKQYPINPKAKPSIQVVINDLLKQGVLVQQNSTMNTPIYPVPKPDGKWRMVLDYREVNKTIPLIAAQNQHSAGILSSIFRGKYKTTLDLSNGFWAHPITPESYWLTAFTWQGQQYCWTRLPQGFLNSPALFTADVVDLLKEIPNVQAYVDDIYISHDDPVEHVQQLEKVFSLLLNAGYVVSLKKSEIAKHEVEFLGFNITKEGRGLTDTFKQKLLNITPPKDLKQLQSILGLLNFARNFIANFSELVRPLYNIVSSANGKYITWTQENSQQLQNIISTLNSAKNLQERNPEVRLVMKVNTSPSAGYIRFYNEATKQPIMYLNYVYSKAETKFTMTEKLLTTIHKGLIKALDLAMGQEILVYSPIVSMTKIQKTPLPERKALPIRWITWMSYLEDPRIQFYYDKTLPELLQVPKVTEDEIAKTKHPSEFNMVFYTDGSAIKHPNIKKSHSAGMGIAQVQFKPDFTIVNTWSIPLGDHTAQMAEIAAVEFACKKALKITGPVLVVTDSFYVAESANKELPYWQSNGFVNNKKKPLKHVSKWKSIAECLQLKPDIVIMHEKGHQPSNTTFHTEGNNLADKLATQGSYVVNTNTTPSLDAELDQLLQGHTP

SEQ ID NO: 8172 - protein, 438 aa, synthetic construct
IAQKAINIFEKVQVFQRKIYLSTKADNKRKFGVLYDKVYRKDILKVAWFYVKRNKGSAGIDDFTIEEIEAYGVQKFLDEIEDQLRNKKYQPKAVKRVYIPKANGKKRPLGIPTVRDRVVQTAVKIVIEPIFEADFQEFSYGFRPKRSANQAIREIYKYLNYGCEWVIDADLKGYFDTIPHDKLLLLVKERVTDKSIIKLLSLWLEAGIMEDNQVRSNILGTPQGGVISPLLANIYLNALDRYWKNNRLEGRGHDAHLIRYADDFVILCSNNPKKYYQYAKQRIDKLGLTLNEEKTRIVHATEGFDFLGYTLRKSKSHKSGKYKTYYYPSRKSMKSIKGKVKDVIQTGQHLNLPDVMERLNPMLRGWANYFKAGNSKQHFKSIDNYVIYNLTIMLRKKHKKSGKGWREHPPSWYYNYFGLVCLRKLSTNINDDSQRYGR

SEQ ID NO: 8173 - protein, 207 aa, synthetic construct
KKGKPIYVPNSFGEELGKKIKRKVAKKYTFDNFIYHFKDGSHVVALHRHRKNAFFCRVDISRFFYSVKRNRLKRVLKSIGISKAEHYAKWSTVKNPFDGGGYVLPYGFIQSPILATLVLAESPIGAFLRGLPETITPSVYMDDLCLSGQDEAELKVAFDGLVAAVVDAGFTLNDEKTREPAPQIDIFNCSLESGSTVVLPERIEEFF

SEQ ID NO: 8174 - protein, 213 aa, synthetic construct
FELKYRTRGKWIFVPTDQCERKGRRIIQYFSRFKFPDYFYHYQPGGHIAALHAHLQHKLFFKIDIQNFYYSIARMRVTRALRSHAYPGANTLAKWSTVRNPYGGPLAHVLPIGFVQSPLLASLVLMKSPVAEAIERARKSGVTISVYMDDFIGSHDDEATLQAAYADIRDASVRAGLLPNPAKLVAPTAAITAFNCDLSFGAANVSIDRVAKY

SEQ ID NO: 8175 - protein, 219 aa, synthetic construct
TVKFETYRYSYLRKGKPVFVPSERGEAIGRELKAKVEAAINFEDIYYHLREGGHVAALHAHRDHRYFARVDIERFFYGISRNRVARELHGIGIEKAGYFAKWSCVKNPFEEPRYALPYGFVQSPILATLVLTRSGVGAFLRGLPENVTASVYMDDIALSCDDAEALQATYAGLRAALEESNFAINEDKAQRPAEAIELFNCALSQRFTSVLQARRDDFF

SEQ ID NO: 8176 - protein, 218 aa, synthetic construct
LENYKEKYKHEGKFIFVPNYECIRKGLRIVEFCRDRLEFPDCFYHYRNGGHVAALHRHLDNRFFFRIDLQNFYYAISRNRVCAALHASGFHKARTYGKWSCVRNPVAEDPRYSLPIGFVQSPALASLVLMRSPIMGAISAAERDSVFISVYLDDLIGSSTDFSLLERAYYTILEACGAANLQVNARKLLPPASEIHAFNCVLKHGLAEVTDERIRKFV

SEQ ID NO: 8177 - protein, 228 aa, synthetic construct
TVAIRNYSFKYDRRGKPVFAPSNVGRRIGNEVKEAVEGAFAFSPLYFHFRAGGHVAAIHHHRPHRFFARIDISRFFYSISRRRVQSALDRIGVANAAFYAKWSTVTNPFEAPRYALPYGFVQSPILASLVLASSSVGEHLSSLSPDVTVSVYVDDISLSADRLDALQAAYDATLAVLESDGFLVSADKLRPPAAAIDVFNCDLAQGLSKVQDDRINQFMADLPSHEAE

SEQ ID NO: 8178 - protein, 228 aa, synthetic construct
PVQFQNFDYTYQRNGKPVFAPSPLGRQIGEDIKEQVEAKYQFDDFVFHLRKKGGHVAALHSHRPHGYFARVDIRRFFYSVARNRVQRALATIGIPRARHYAKWSCVKNPYDLPTYSLPYGFVQSPILASLVLMESAVGSFLRGLVAENHVTVSVYMDDISLSSDDLPRLQAAFNRLVHDLAEARFQVSPAKLRPPGPVMDLFNCDLRQGETVVREERIDLFEAEPQSH

SEQ ID NO: 8179 - protein, 243 aa, synthetic construct
YDHHFALKPGTRVYIPTEMGRKRGTEIKGAIEGLWKPPANYFHLLEGGHVAAVKSHRNATWLASLDLQRFFDQITRTKIHRALKVIGLPHQDAWEMACDSTVDKKPPKRHFSLPFGFVQSPIVASVVLAQSALGGAIRNLVAGGLTVTVYVDDITISGSSEEQVFAAVEQLETGAELAGLAFNPEKTQLPNGAVTSFNIAFGSGALEVKEDRMAEFEVAIRNGNEYQIEGILGYVGSVNHGQA

SEQ ID NO: 8180 - protein, 246 aa, synthetic construct
KWLHKFERKPGRWVFEPSPEARAEGVEVKELVESHWKAPSYYFHLRQGGHVAALMRHQRSTCFVKVDIADFFGSVSRSRISRVLKEFVSHAEARRIATASTVQHPEDPARQILPYGFVQSPLLASLALHKSGLGKYLDQLHRENSVVVTVYVDDIIVSGNDPEELGDVLTTMKTKAQRSRLAFSDDKEQGPAATISAFNIELAAGTPLSVLPPKLAEFREAFQASTSELQRAGIQGYVRSVNPVQA

SEQ ID NO: 8181 - protein, 249 aa, synthetic construct
KRWEHRFQVKSGRWVFVPTPASRAVGEQIRARVAKAWSPPAFYYHLRKGGHVAALRAHADSTYFFRCDLKNFFGSINLSRVTRCLKRYFSYVEARGMASASVVIAPGATKTMLPYGFVQSPLLASLALDQSRAGAYLRKLSAQEGITVSVYMDDIVVSSLEIGLLDKIKAELGEKAEKAGISLNQEKTEGPSTLVTVFNVELSHNSLVISEERMAEFREALMIASCDAVAMGILGYVASVNDAQLSKLY

SEQ ID NO: 8182 - protein, 243 aa, synthetic construct
RNFNHKIDLGNGKWAYVQEKHLIPHARRMTNLIIERARFPKFYFHFHSGGHVMASKLHSENSFFSHIDLERFFYHVSKNKIVRSMKKVGFGFREAEGFAVVSTVRSEKGFTLPFGFVQSPALAALVLDQSQLGKTLREIAPNVQTTLYGDDILLSSKNEKTLREASDNVLLACQKANFPTNQEKTKVVQTKITAFNINISRNCLEITEERMNDFYVNIRHLGNCPTTQGILGYVSRVNQRQAE

SEQ ID NO: 8183 - protein, 249 aa, synthetic construct
KWLSRFRLKSNTWVYVPTFETVKEGKLFKKAIEFKWIPPTNYYHLRSGGHVEAVKYHLGGKFFVHADISKFFNSINRSRITRELKPYFGYERSRAIAMESTVSIPVDSGQIFALPFGFVQSTIIASLCLRKSSLGKTIDVLNKTDGIRVSVYVDDIVVSTQCLEKAKAAFLMIQKSAERSGFLLNKEKSQGPSDKITAFNIDLRQNFMEVTSWRFSELLSSYKDATSDKKKSGIWGYVNSVNSAQASML

SEQ ID NO: 8184 - protein, 248 aa, synthetic construct
WSNRFEIKPGRWVYNPTKESRLIGQKIIKLLNKSWKKPPYYYHLRCGGHVEALAIHLENQFFATVDISDFFGHISRSRITRALKPIVGYEVARKIAKLSTIKTTENYTHSHHLPYGFNQSPILASICLFNSTLGKYLETAANDENITVSVYMDDIVISSQNEELLTQTFDQIFFTAKKSKFVINENKTKPVAKQTEAFNIVITHGDMKIEYDRLVKFQHAYSGSNSEHQRHGIGSYVGSVNKAQAKLL

SEQ ID NO: 8185 - protein, 250 aa, synthetic construct
WKNRFEVKPGTWVYEPTLESKKYGRELITQIRKKWKAPEYYYHLRDGGHVKALEKHTANNFFASLDIKDFFGSISRTRVTRTLKPLFGYDIARKLAKLSSVKNDGSKAHSHSIPYGYVQSPILASICLHKSTFGSELDSCFNDQNVTISVYVDDIVISSNDKKLLKHWCERLKNAAKRSKFTLNALKESPADSTVVAFNIEVTHNSMVITKERFKLLYEAYQNSQSIMQRKGIGGYVGTVNKSQARLLDL

SEQ ID NO: 8186 - protein, 251 aa, synthetic construct
DKWIHKFEIKEGRWVYVPSEKTREIGGKIHFYIKHKWNYPLYMYHLRKGGHVAAANRHIKKQYFSLIDISDFFGSTSQSRVTRELGKLIPYAKAREIAKLSTVRSPPSNGLKHVIPYGYPQSPILATLCFHQSFCGKLINIISKSGQISVSIYMDDILLSSDDLSQLEIAFNSVKAALAKSGYCINERKTQSPSTMVKVFNLELSQQSLRVSPKRIVEFLQAYISSKNAAERKGIASYVGSVNKSQSTIFK

SEQ ID NO: 8187 - protein, 252 aa, synthetic construct
KPTWLHKFEVKENRWVYIPDAETHHLGQKIHTYIKHKWKSPLYMFHLREGGHVAAANYHIKKKYFSLIDISNFFGATSQSRVTRELGRLIPYVKAREIARLSTVKNLNGNGLKHVIPYGYPQSPILASLCFHQSFCGSTINTVSKSGHVSVSIFMDDILLSSDDLGQLENAFDIILEAIRRSGYTVNENKTQPPSLMVNVFNLELSQNSLRVTSKRIVEFLQAFISSKNPHERKGIASYVGSINTAQAKLFR

SEQ ID NO: 8188 - protein, 250 aa, synthetic construct
ERWNSKFQIKKGAWVFIPTKETIDNGLQIKKLIEKHWSFPKYYFHLIKGGHVRALHEHKKHKFFIHLDIKNFFGQINRSRVTRSLKEYVSYEKAREIAVESTVRLPESTEVKYILPFGFVQSPIIASICLSKSALGRHLTSLKQQNEYAVSIYMDDILVSANNSEKLMMEIMRIKAASEKSKLLLNAAKQVGPDTRIKAFNIEISQDLLQITPSKLQELANTYATSENDHQRAGIFNYVLSVNPSQVEAF

SEQ ID NO: 8189 - protein, 254 aa, synthetic construct
NTENEWLHKFEIKPGRWVYIPNEATLKQGKLIHAYIRSKWKSPLYMFHLREGGHVAAANHHVQKKYFALIDIQDFFGATSQSRITRALGNFIPYDKARKIAKLSTVKNQNGNGLKHVIPYGYPQSPILASFCFHQSFCGDLIKNISKSGDISVSIYMDDILLSGNDLGRLEDTFKAVNEALVKSGYTVNRSKTQLPSTIVNVFNLELSQNSLRISAKRIVDFLQTYISSSHPPEKKGIASYVGSVNKEQARLFK

SEQ ID NO: 8190 - protein, 250 aa, synthetic construct
TYEAKWINKFLLKPKKWVFVPSKQSKIIGKNICRLLRKHWDPPEYFYHLRNGGHVEALRAHEQNQYFSRLDIDNFFGSITRSRITRSLKKFVSYKTAWDIAHQSTVKDPDCISMRFMLPFGFIQSPLLASICLDQSFLGEFLKLLNKNPQLSLSVYMDDLVISSNDRDLLLSISADLKNAIVKSHWSSNEQKEDICKQLIMAFNIEISHQSTRISDPRMQEFKYSYKHAANSNSKLGIVNYIRSVNPVQG

SEQ ID NO: 8191 - protein, 254 aa, synthetic construct
STPSDWLHKFEIKAERWVFVPSKETLKRGQKIHAYIKQKWKYPRYMFHLRNGGHVAAANFHLKSNYFSLIDVSDFYGTTSQSRVTRELGRLVPYVKAREIARLSTVVNPNRNGFKHVIPYGYPQSPILASLCFHHSFCGGVISSISKSERVFVSVYMDDILLSSDDMNLLVEAFDTVRQALRKSGYTLNENKTQPPSPKIQVFNLELGHNHLRVTPKRIVEFLKVFTSSSNEHERKGIASYVGSINKSQAKLFR

SEQ ID NO: 8192 - protein, 253 aa, synthetic construct
EKWKHKFLLKENKWVHIPSEEMIKYGSALHRYIRKNWRFPLYYYHLRNGGHVAAARLHKRNNYFCLIDIKGFFESTSQSRVTRELKKIIPYDKARLIAKLSTVRLPNAVGHKFAVPYGYPQSPVLATLCLQNSYAGNVIDSFHRSGCVTVSVYMDDIILSCKSLVTLNQHFDVLCKALRKSRYELNASKTQSPAAKISVFNLELGHQHLKVESERMMLFIQAFAKSGNEHERKSIAKYVNTVNASQARHHFPK

SEQ ID NO: 8193 - protein, 256 aa, synthetic construct
TIEVQRWEDKFEIKPGVWVYIPSVEARKVGGKILQAVRNKWIPPLYFYHLRTGGHLKAARLHLKSDFFAVVDIKQFFQSTSRSRITRDLKSYFTYSQAREISTFSTVRNLSHSPHKHVLPFGFVQSPILATLCLDKSYFGSLLRRLNKHHDLKLSVFMDDVIISSNDLAQLQAAYDEALVAMRKSGYQANMSKTQAPSSKISVFNLTLSKGVMKVTSQKMSDFLIDFYSSNYEPHRIGVKNYVEAVNPGQAKLFKL

SEQ ID NO: 8194 - protein, 256 aa, synthetic construct
TIEVQRWEDKFEIKPGVWVYVPSVEARKVGGKILQDVRNKWIPPLYFYHLRTGGHLKAARLHLKSDFFAVVDIKQFFQSTSRSRITRDLKSYFTYSQAREISTFSTVRNLSHSPHKHVLPFGFVQSPILATLCLDKSYFGSLLRRLNKHHDLKLSVFMDDVIISSNDLAQLQAAYDEALVAMRKSGYQANMSKTQAPSSKISVFNLTLSKGVMKVTSQKMSDFLIDFYSSNYEPHRIGVKNYVEAVNPGQAKLFKL

SEQ ID NO: 8195 - protein, 255 aa, synthetic construct
TLELQRWKHKFEIKPGVWVFAPSPEAVKNGSKILNAVRKHWNPPLYFFHLRTGGHLKATRLHLKNTYFAVVDIKQFFLSTSRSRVTRCLNEYFSYEKAREISRYSTVKNPSSGLHKYVLPFGFVQSPILATLCLDKSYLGSLLRKLSRKGTMKLSIYMDDVIISSNDFQTLQTTYQEILQAMEKSGYKLNLKKSQPPSNKIVVFNISLRHGNMSVTAERLSEFLIDFYASNDEQHKLGIANYVRSVNLEQAKLFR

SEQ ID NO: 8196 - protein, 251 aa, synthetic construct
VKWEHRFELKKDKWVYVPTKEMRLYGTEIHNHLRAKWIPPLYFYHLRDGGHVACAKKHLHNRYFALIDIKNFFESTGQSRLTRELKTYLTYNNARQVAKLSTVRNPLPERPKYIIPYGYPQSPILSTFCLHKSFCGNLFKQLHVNPDIDISIYMDDIILSANDLSSCESAYRLLSEGLERSGYQMNTLKSQFPSEKIHVFNLELKHNSLRVLPFRLIEFLIAYTKSKNRHERKGIASYVGSVNTDQAKLFK

SEQ ID NO: 8197 - protein, 256 aa, synthetic construct
EIEVQRWEHKFEIRPGVWVYVPSVRTSELGERILQSIRNKWIPPLYFYHLRTGGHLKAARLHLKSSFIAVIDIKHFFQSTSRSRITRDLKAYFTYSQAREIAKFSTVKNLSDTPHKHVLPFGFVQSPMLATFCLDKSHLGSLLRRLNKHPNVKLSVYMDDVIISSNDIVQLQTTYDEILLAMDKSGYQVNMIKTQAPSSLIKVFNLYLSKGNMKVTSQKMSDFLIDFYASDYEPHKIGVKNYVESVNPEQAKLLKL

SEQ ID NO: 8198 - protein, 255 aa, synthetic construct
SNMAPRWINKFEIKPNVWVYEPSEACREEGAEILRFINRKWKIPTYYYHLRRGGHVEALRVHIENDWFVSLDIKEFFQSTSRSRVTRTLRNFLPYEKARIIAKVSTVSNFTNDKFSHFIPFGYVQSPLLATICLHYSSFGQLIKELSRCEDVKLSVYMDDIILSSSSLELLERTKTLLEESASRSHYKLNTLKVQGPAERITAFNIDLSHQSMVISPKRLLSFLVDFNSPDSDNLKREGIRSYIYSVNSEQAEYF

SEQ ID NO: 8199 - protein, 434 aa, synthetic construct
STIDVTLKEVADPIRLKLAWTKIKKKGSIGGVDGVTISSFNANLEVNLSELSNQILTNQYTPEPLQAAHIPKPGKSEKRQLGLPSLKDKIVQSSLASILSDFYEIHFSNCSYAYRPGKGSVKAIGRVRDFLNRKNYWIASVDIDNFFDSVDHEICTSILKEQISDQSIIRLISLYFSSGMIKFDQWQDTEIGIPQGGAISPVISNIYLNKLDHFLHTLNAFFVRYADDIILFSNTQQSLSETYQKTNEFLNKKLNLKLNALDNPIINVSKGFSFLGIYFHRCQLKIDFKRIDEKIEKMKYIIHKQKQIDAVIKEINEFFNGVQRHYGNIIPDSYQLKNLESTVLDELSIFLAKMKNEGHINSKKACKLVLDPLVFMSERTKSQRDAVIDKIIADAFTIVDQKKDTDEKRIEKSVDSAIHQKRQAYAKKIATETE

SEQ ID NO: 8200 - protein, 437 aa, synthetic construct
AGVQRTLPAETDGQDNGEASTFDLLERILSSNNMNAAYKQVVRNKGSHGIDGMKVDELLPHLKENGNNLIEELKAGTYRPKPVRRVEIPKPDGGVRLLGIPTVVDRMIQQAIAQILTPIFDPEFSESSFGFRPGRSAHQAIKRAQEYMDEGYNWVVDIDLAKYFDTVNHDKLMALVARKVKDKRVLKLIREYLKAGVMINGVVIETEEGCPQGGPLSPLLSNIMLDELDKELEKRGHKFCRYADDCNIYVRSRKAAERTMQSVTKFLEGKLKLKVNREKSAVDRPWKLKFLGFSFYRGKEGIRIRVHRKSIERVKEKIRNITSRSNGMSMDTRLLKLKQLIRGWVNYFRIADMKSLAQSLDEWTRRRLRMCIWKQWKRVRTRFQNLMKLGLDRQKALEFANTRKGYWRIANSPILSVTITNERLQKRGYTGFVAELA

SEQ ID NO: 8201 - protein, 418 aa, synthetic construct
LEQILARENLMTALHRVERNKGSHGVDGMPVQNLRAHIMEHWASIREQLETGTYYPQPVRRYEIHKEGGGMRKLGIPTVLDRFIQQAIAQVLTTIYDPTFSENSYGFRPKRRGHDAVRKARAYMKDGYRWVIDMDLEKFFDKVNHDRLMRTLSRRVKDPKVLQLIRRFLQAGIMEDGVVHPNTEGASQGGPLSPLLSNIVLDELDKELEKRGLHFVRYADDFHIYVRSKRAGHRIMESITNFIEKKMKLEVNKEKSAVDRPWKRKFLGFSFTFHKENPKIRIAKESIKRFKRRIRELTSRKKSMNMGDRIEKLNQYLAGWLGYYQLAETPTIFKELDGWIRRRLRMIRWKEWKKVKTKHKNLVKQGIKKGKAWEWANTRKSYWRTANSPILHRALGDQYWSEQGLKSLTNSYLTKRWT

SEQ ID NO: 8202 - protein, 419 aa, synthetic construct
LEQLLSRENLLQALKRVESNKGSHGVDGMTVKSLREHIVQNWQKIRQAIEEGTYEPSPVRRVEIPKPNGGGVRKLGIPTVTDRMLQQAIAQVLTPWFDPPFSEHSYGFRPKRRGHDAVRKARTFMKEGYRFVVDLDLEKFFDRVNHDRLMMKIAEKVKDKKVLLLIRKYLQSGVMENGLVQPTREGAPQGGPLSPLLSNIVLDELDKELEKRGHRFVRYADDCNIYVKTLRAGERVKASVTRFIETRLKLKVNQAKSAVDHPWKRKFLGFSFSTDIEPKVRIAKQSLQKAKVRIREITSRKKPMRMEERMKELNQYLMGWCGYFSLADTPSIFQRMDAWIRRRLRMCLWKQWKNPRTKVKRLLSLGMPKGKAYEWGNTRKGYWRIAGSPILSRALNNQYWESNGLKSLLDRYNSIRNIS

SEQ ID NO: 8203 - protein, 418 aa, synthetic construct
LMKPILSRENLLNALKRVERNGGSYGVDKMSTQNLRLYIVEHWAELRNALQQGTYEPQPVRRVEIPKSNGGVRLLGIPTVLDRFIQQAITQTLTPIYDPTFSENSYGFRPQRRGHDAVRKAKGYIEEGYRWVVDIDLEKFFDKVNHDKLMGLLSKRIDDKTLLGLIRKFLNAGIMIGGVVSQNTEETPQGGPLSPLLSNIILDVLDKELEDRGHKFVRYADDCNIYVKSKKAGIRTMEGITAFIEKGLSLKVNHDKSAVDRPWNRKFLGFSFTNRKEPKIRIAKQSIKRFKLKVKEITSRKSPIPMEIRIQKLNQYLVGWCGYYALADTPSVFKDLEGWIRRRLRLCYWKQWKLPKTRIRKLIGFGIDKHKAYEWGNTRKGYWRITNSPILSRALNNAFWRKEGLKSLYERYESLRHT

SEQ ID NO: 8204 - protein, 419 aa, synthetic construct
LMERILSKENLLSALKRVERNKGSHGVDEMRVQNLRTHIVNHWEPIKMELLKGDYEPQPVRRVEIPKPDGGVRLLGIPTVMDRFIQQAIAQILTSVYDPMFSDHSYGFRPKRSAHDAVRKAKGYLTEGNRWVVDIDLEKFFDKVNHDRLMGTLAKRIQDKRLLKLIRKYLKSGIMINGIVSASEEGTPQGGPLSPLLSNIVLDELDSELEKRGHKFVRYADDCNIYLKTKKAGSRVMNSVTSFIEKKLKLKVNLDKSAVDRPWKRKFLGFSFTFHKEPKVRIAKESLQRMKNKIREITSRKKPCPLAYRIKKLNQYLMGWCGYFALADTPSVFRNFDSWIRRRLRMCMWKAWKLPKTKVRKLTGLGIPKGKAYEWGNTRKSYWRISNSPILHRALDNSYWNHQGLKSLSSRYEVLRNQP

SEQ ID NO: 8205 - protein, 417 aa, synthetic construct
ERILSRGNLLSALKRVERNKGSHGVDGMSVQNLRRHIMEHWESLKAELLEGTYQPQPVRRVEIPKPDGGVRLLGIPTVTDRFIQQAIAQVLSSIYEPTFSNHSYGFRPNRSAHDAVRKTKEFIKEGKRWVVDIDLEKFFDRVNHDRLMGTLSKRIKDKRLLKLIRSYLKAGVMINGLVSANEEGTPQGGPLSPLLSNIVLDELDKELEKRGHAFVRYADDCNIYVNTQKAGSRVMASLTSFIEGKLKLKVNQGKSAVDRPWKRKFLGFSFTSGKEPKVRIAKESIKRMKQKIRDITSRKKPYPMEYRIEKLNQYLMGWCGYFALADTPSIFIRLDSWIKRRLRMCRWKEWKQPKTKMRKLIGLGVPKWQAYEWGNSRKGYWRISKSPILHKTLGNSYWSTQGLKSLISRYESLRHIS

SEQ ID NO: 8206 - protein, 419 aa, synthetic construct
LLNQILSRENMLQALKRVEQNKGSHGVDWMPVQILRQHIVENWHSIREAIFKGTYEPMPVRRVEIPKSDGGVRLLGIPTVKDRLIQQAIAQVLSKIYDPMFSEHSYGFRPNRSAHDAVRKAKGYIKEGYRWVVDMDLEKFFDKVNHDRLMGTLAKRINDKPLLKLIRKYLQAGVMMDGVISSTEKGTPQGGPLSPLLSNIVLDELDKELESRGHKFVRYADDCNVYVKSKRAGERTRASIQRFIEKKLRLKVNEKKSAVDRPWKRKFLGFSFTSSKEPKIRIAKESLKRMKMKIREITSRKMPYSMRYRMEKLNQYLMGWCGYFALADTKSLFIKLDGWIRRRLRMCQWKDWKKPKTRIRNLIHLGVPKGKAYEWGNSRKGYWRVSNSPILDKTLDISYWNNQGFKSLQTRYKFLRHLS

SEQ ID NO: 8207 - protein, 419 aa, synthetic construct
LMNQILSRENLLLALKRVERNKGSHGVDKMPVKFLRQHVVENWLTIKKQILEGTYQPQPVRRIEIPKPDGGVRLLGIPTVTDRLIQQAIAQVLSNLYDPNFSNHSYGFRPKRSAHDAIREAKGYIKEGYRWVVDMDLEKFFDKVNHDRLMSTLAKKISDKPLLKLIRRYLQSGVMINGVVYDTDEGTPQGGPLSPLLSNIVLDELDKELEKRGHKFVRYADDCNIYVKTKRAGERVMASIKTFIEKTLRLKINEKKSAVARPWQRKFLGFSFTSRKEPQVRIAKESIKRMKNKIRELTARKKPFPMEYRIQQLNQYLIGWCGYFALADTKSIFESLDGWIRRRLRMCLWKDWKKPRTKVRNLIRLGVPDWKAYEWGNTRKSYWRISKSPILHRTLGNSYWSNQGLKSLQARYEILRYSS

SEQ ID NO: 8208 - protein, 419 aa, synthetic construct
LLNQILSRENLLQALRRVEKNKGSHGVDKMPVQTLRQHMKDNWLSIKEQLLEGTYEPQPVRRIEIPKPDGGVRLLGIPTVTDRLIQQAIAQVLSRLYDPTFSEHSYGFRPNRSAHDAVRKAKGYIKEGYRWIIDMDLEKFFDKVNHDRLTSTLAKRINDKPLLKLIRKYLQSGVLINGIVLDINEGTPQGGPLSPLLSNIVLDELDKELEQRGHRFVRYADDCNIYVKSKRSGERVMESVQTFIERKLRLKVNKKKSAVDRPWKRKFLGFSYTSNKEPKVRIAKESLQRMKKKIREITSRKKPYPMEYRIEQLNRYLIGWCGYFALADTKLIFGEIDGWIRRRLRMCLWKNWKKPRTKVRNLIRLGIPDGKAFEWGNTRKGYWRISNSPILSRALNNSYWSNQGFKSLQARYEILRYSS

SEQ ID NO: 8209 - protein, 417 aa, synthetic construct
ERILSRENLLNAIKRVEKNKGKHGVDEMPVAALRGHIMLNWNELRKSLSEGTYIPSPVRRVEIPKPDGKGKRKLGIPTVTDRFIQQAITQVLTKMYDPGFSECSFGFRPKRRAHQAVKLAQSYIEEGYRWVVDIDLEKFFDKVNHDKLMSKLAERINDRTLLKLIRRFLTSGVMEGGLVSPNLEGTPQGGPLSPLLSNIVLDELDTELERRGHRFVRYADDCNIYVKSKRAGERVMKAMTHFIEGKLKLKVNRDKSAVDRPWRRKFLGFSFTSNLKPKVRISPQSIKRFKDKIRKLTSRRRSIAMEVRIHDLNEYLVGWVNYYHLADTRSVITKLEGWVNRRLRMIRWKEWKLPRTKIKKLIELGVPEGKAYKWGNTRKAYWRISKSPILHKTLGKAYWLSLGLKSISARYDLQRST

SEQ ID NO: 8210 - protein, 419 aa, synthetic construct
DLMEQVVARENMWAALRRVEQNRGAPGVDGMTVEQLRGFLREQWSQVRAQLLAGTYKPQPVRRVEIPKPGGGTRLLGIPTVLDRLIQQALLQVLTPIFDPDFSEHSYGFRPGRSAHQAVEAARRHVEEGYAWVVDLDLEQFFDRVNHDVLMARVMRKVADKRVRMLIRRYLQAGVMVGGVKVRTEEGTPQGGPLSPLLANILLDELDKELERRGHRFVRYADDCNIYVRSERAGHRVMAGVRRFLEKRLRLKINEQKSAVDRPWRRKFLGFSMYRGREGIRLRVAPQTVQRLKDRIRGLTSRTWPVSMPERIRRINAYLRGWLAYFRIADMAVLLRNVEGWLRRRLQACLWKQWKRPRTRLRELRALGHPEWRVRQWALSRRGYWAMAGGPLNSALGKPYWLAQGLLSLTRCYHELRRA

SEQ ID NO: 8211 - protein, 423 aa, synthetic construct
ALLETILSRNNLITALKRVEANKGAPGIDGVPTEQLRDDIRKHWKSIKRQLLEGTYKPAPVRRVEIPKPNGGVRLLGIPTVMDRFIQQAILQVLTPIFDPHFSPYSYGFRPKRRAHDAVRQAQKYIQEGYRYVVDIDLEKFFDRVNHDILMSRVARKVEDKRVLKLIRAYLKAGVMLEGVRVRSEEGTPQGGPLSPLLANILLDDLDKELEKRGLKFCRYADDCNIYVRSPRAGQRVKQSVQKYLEKKLKLKVNEEKSAVDRPWKRKFLGFSFTSQREARIRLAPKSVQRFKNKIRQLTNPNWSLPMEERIRKLNQYTMGWMGYFALIETPSPLKRLEEWIRRRLRLCRWHQWKRVRTRIRELRALGLKEHEVFEIANTRKGAWRTTRTPQLHKALGKAYWLKQGLKSLTQRYFELRQDWRTA

SEQ ID NO: 8212 - protein, 419 aa, synthetic construct
ALLERILARDNLITALKRVEANRGAPGIDGVSTDQLRDYIRTHWSSIRAQLLEGTYRPTPVRRVEIPKPNGGIRLLGIPTVMDRLIQQAILQELTPIFDPDFSPYSFGFRPGRSAHDAVRQAQRYIREGYRYVVDIDLEKFFDRVNHDILMSRVARKVKDKRVLKLIRAYLQAGVMIGGVKVQTEEGTPQGGPLSPLLANILLDDLDKELEKRGLKFCRYADDCNIYVKSLRAGLRVKQGIQRFLEKKLKLKVNEEKSAVDRPWKRTFLGFSFTPEREARIRLAPKSIQRFKQRIRQSTNPNWSLPMEERIRRVNQYTMGWMGYFQLIETPSILRNMEGWVRRRLRLCLWLQWKRVRTRMRELRALGLNERTVLEIANTRKGAWRTTKTPQLHQALGKSYWKAQGLKSLTQRYFELRQG

SEQ ID NO: 8213 - protein, 466 aa, synthetic construct
CRKQNSERNSFGKVGVKPRGYRRGQSIDRQDLSLVLRREKYRVELLEQILERKNLLEALKKVESNGGAAGIDGVSTEHLRAYVVEHWEKIRQQLLDGTYKPAPVRRVEIPKPDGGVRLLGIPTALDRMLQQAILQVLTPIFDPGFSPNSFGFRPGKRGHDAVRQAQRFIREGYRIVVDIDLEKFFDRVNHDILMSRVARKVKDKRVLKLIRKYLKSGVMAGGIVSHTEEGTPQGGPLSPLLSNIMLDDLDKELERRGLHFSRFADDCNIYVKTKRAGERVKASIERYLEGKLKLKVNKEKSAVERPWKRKFLGFSFTAQKEARIRISPKSLKRVKDKIRTLTKPTWSISMKERIQQLNQYLMGWIGYYALIETPKPLAELESWLKRRLRLCLWHQWKRVRTRYRELRKLGLTHQQAFEIASTRKGAWRTSITPHLHKALGNAYWQSQGLKSVTQRYFEIRQGWRTA

SEQ ID NO: 8214 - protein, 423 aa, synthetic construct
DLMEQILSRQNLLEALHRVESNKGAVGIDGVSTEQLREYVMKHWGTIRQQLLEGTYKPSPVRRVEIPKPDGGVRLLGIPTVIDRLIQQAILQVLTPIVDPGFSPNSFGFRPNRRGHSAVRQAQRFIREGYRIVVDIDLAQFFDRVNHDILMSRVARKIKDKRVLKLIRAYLQSGVMTGGVCVSSEEGTPQGGPLSPLLGNILLDDLDKELERRGLRFCRYADDCNIYVKTRRAGERIKASVTRFLEGRLKIKVNEEKSAVDWPWKRKFLGFSFTFEKEARIRLAPKSLKRVKNKIRELTTPTWSISMKERIRILNQYLMGWMGYYALIETPSILKTLEQWTRRRLRLCLWHQWKRVRTRIRELRALGLPERQVLEIANTRKGAWRTSQTPHLHKALGIAYWQSQGLKSLTQRYNELRQGWRTA

SEQ ID NO: 8215 - protein, 462 aa, synthetic construct
RSRDGHRQQNTSQEGCQREVAVKPQGTVGVPSPLPAQIAPSSRKAQDDLLEKMLERENLLKAYRKVVQNGGAPGVDGVTVTELQAYLNTHWEAVKAALLAGTYSPLPVRRVEIPKPGGGVRLLGIPTVMDRLLQQALLQVMEPIFDPHFSWHSYGFRPGKRAHDAVRQAQQYIQSGLRWVVDMDLEKFFDRVNHDILMARVARRIDDKRVLKLIRAYLNAGVMAGGVVVRTEEGTPQGGPLSPLLANILLDDLDKELTRRGLHFVRYADDCNIFVASKRAGERVMESVIRFVEGKLKLKVNRDKSAVDRPWNRKFLGFSFLSNKQATVRLAPKTIQRFKKKVREITDRSRPLTMEERIHRLNRFMMGWIGYFRLAAAKNHCGNLDAWMRRRLRMCLWKQWKRPRTRLRNLRALGVPEWAARMMANSRRGPWEMSRNTNNALPTSYWEAKGLKSLLSRYLELC

SEQ ID NO: 8216 - protein, 462 aa, synthetic construct
RSHEEQRQPNISQESCQQREAVKPSGYAGAPSSSSAQVAPSSREDQNNLLERLLEGDNLRLAYKRVVQNGGAPGVDHVTVANLQAYLKTHWETVKAELLTGTYRPAPVKRVEIPKPGGGVRLLGIPTVMDRFLQQALLQVMNPIFDAQFSWYSYGFRPGKSAHGAVKQAQRYIQSGLRWVVDLDMEKFFDQVNHDMLMARVARKVADKRVLTLIRAYLNAGVMVDGKLERSWEGTPQGGPLSPLLANILLDDLDKELTGRGLRFVRYADDCNIFVASKRAGERVKESVCRFVEGKLKLKVNREKSAVARPWHRKFLGFSFLSQKQATIRLAPKTISRFKEKIRELTNRTWSISMEERISRLNRYMMGWIGYFRLASAKTHLQNLDQWIRRRLRMCLWKQWKRVRTRIRELRALGVPEWACFMMGNSRRGVWEMSRNINNALRASYWEAKGLKSLLSRYLELG

SEQ ID NO: 8217 - protein, 409 aa, synthetic construct
ERVLSQQNMHEALKQVRRNKGAAGIDGMETADLRPWLIEHWVRIREELLGGTYKPLPVRRVEIPKPDGGVRLLGIPTVVDRLIQQALHQELYHIFDPGFSESSYGFRKYHSARQAVEKARRYIGEGFRYVVDMDLEKFFDRVNHDMLMARVARKVTDKRVLKLIRAYLEAGVMTGGLFGETREGTPQGGPLSPLLANIMLDDLDKELEKRGHRFVRYADDCNIYVRSRRAGERVMDGMRKFIENRLKLKVNEAKSAVDRPQNRKFLGFSFTGEKEPRIRIAPKALERFKNTVRRLTDRGRSTSTEERIRRLSEYLRGWAGYFRLAQTPSVFQKLDRWIRRRLRMCILKQWKNIRTKRRKLVSLGLSHDDAMKIASSRKGYWRLAETPQLHIAMGNRYFKTLGLVSLASG

SEQ ID NO: 8218 - protein, 469 aa, synthetic construct
ASSRREQRQQKIPSGSYPQKEAVNPQGAGEAPSSLPAQTTGTTREANRTNLMEMVVERENMIRALKRVEANKGAAGVDGMKVEDLREYLKESWPEIREQLLAGTYHPKPVRRVEIPKPDGGVRLLGIPTALDRIIQQALLQILTPTFDPEFSPFSYGFRPYRKAENAVRRAQEYISEGYRWVVDMDLEKFFDRVNHDILMSRVARKVKDKRVLRLIRRYLQAGVMVNGCCVATEEGTPQGGPLSPLLANIMLDDLDRELMRRGHCFVRYADDCNIYVKSQRAGERVMESVKRFVEGELKLKVNLQKSAVDRPWKRKILGFSFTWDKEPRIRLAPKTIKRFKDKIRELTKRSRSQSMEDRIGALNTYLMGWIGYFKLADTRSVLQSLDEWVRRRLRMCYLKQWKKPKTKLRNLIVLGIPADWAALISGSRKGYWRLANTPQMNKALGLAFWRNQGLRSLVGRYDQLRFTS

SEQ ID NO: 8219 - protein, 420 aa, synthetic construct
EEILADENLQEALQRVCANKGAAGIDGITTTEFHKQMSEEWKETKQRLLLGKYKPKGVRRVEIPKPAGGIRMLGIPTVMDRFIQQAMLQRLTPIFDPEFSKFSYGFRPNKSAHDAVRQAKKYIEEGHKFVVDIDLEKFFDKVNHDILMHLVGKKIRDKRVLRLIGSYLRAGVMTNGVCIPNEEGTPQGGVISPILANIMLNELDKELEARGHKFCRYADDCNIYVKSMKAGERVKASITRFLNKKLKLKVNETKSAVDKPMNRKFLGFTFGNVDSVVIQISSQSLERVKNKIRELTNPMRSVSMEERIKVINRYIIGWLGYYSLIEVPETIESIDGWLRRRMRSCQWQQWKKPKTRIRELIKLGLKESTARKMGYSRKGNWRCSRTPAMHKAMGIKHWKDRGLINLVARYEIYRESWRTA

SEQ ID NO: 8220 - protein, 385 aa, synthetic construct
GTANELPLLEQALSDDRLLAGWERVRANAGGPGVDGVTVEQFGGKVLRALAGLRQRVTASHYQALPLRRIEITRPGKAPRVLAVPCVADRVVQSAVALTISPRLDPGFEDFSFGYRPGRSVPRAVQHLAEARDSGLVWVAEADIQSCFDRIPWAALLQRLGEVLPDAGLLALIQHWLSLPLQWPDGHQQVRCMGVPQGSPLSPLLSNVFLDGMDKELAAGPWRVIRYADDFVIAAASREEARRGLAQAARWLRRLGLRLNLDKTRVIHFDQGFSFLGVRFRGRQMSAVQPGAEPWVLPRATQPRPHSPSSKPAQHSRSPAPTARASAPATPPSAQPEPLGPAAPSPNAAASAQPSQPRAADATLQDLQRLSVAPPNEPSPPRLRT

SEQ ID NO: 8221 - protein, 330 aa, synthetic construct
STLPTPSSTDQDSPPPFWTLARLAEALEHVSARQGGAGADEQTLAEFAADAEAQLGLLALQLTQGSYRPAPARLIPVAKPGGGVRELLLPAVRDRIVQSALARYLADLLEPDFGEASHAYRPGHSVATALHRLQALRDGGLVFVAVCDIHHFFDSVDHRRLFSLLDDLPLERRLREQMKTCVRIEVADVQGQGAWSLARGLAQGSPLSPVLANLFLMAFDAACARAGLALVRYADDCVLACASETEAQSALAFAADALENIGLALNTRKSRLASFAEGFEFLGAFCGAEGMLGGRPGEAACLPPTTGPVHEAAAADDERPPSHGHRPRLR

SEQ ID NO: 8222 - protein, 597 aa, synthetic construct
NPTSDILERIAESSKSHTDGVFTRLYRYLLREDIYFTAYKNLYANAGASTKGTDDDTADGFGAKYVSDIIESLRNLEYSPKPVRRIYIPKHNGKLRPLGIPSFRDKLIQDAIRQILEAIYEPIFSDDSHGFRPGRSCHTAFDRIKYGFNGTKWFIEGDIKGCFDNIDHKVLLNILSKKVKDSKLINLIGAFLKAGYMEEWKYFQTYSGTPQGGILSPILANIYLHELDKKVAEIKQRFDSNEPKKYTEEYGGICHRISTLHRKSKNNPDSPDREKWIAEEVELKRQRVKIPVYQDNNKRICYVRYADDFLIGVVGSKEDCVEIKAELKDFLAAELKLELSDEKTKITHSSESARFLGYDVSVRRSQELKRRSDGVKQRTLNGTVMLNAPLKDKIEEFLISNGYGVRTADGRIVPIATKGLRNRSDFEIVSTYNSQMRGICNYYRMASNFPKLDYFVYIMEYSCLKTLASKHQTTMAKARGDRRTGKRWGVPYETKTGTKTLIFLNMTDIRKSRKAKLDNVDAVPKSVSKQNEIKNRLNAGICELCGCDSEPVVVHHVQSLKALKGKSAWERKMRSIRRKTLIVCETCHNKIHNKTFC

SEQ ID NO: 8223 - protein, 598 aa, synthetic construct
KPTSEILERMYRNSEEHSDGIYTRLYRYLLREDIYMTAYKNLYANKGAGTEGVDNDTADGFGKEYVNQIIDELKNQTYEPKAVKRVYIPKRNGKMRPLGIPSFRDKLIQDAIRQILEVIYEPVFSTHSHGFRPNRSCHSALKEISRSFRSTKWFVEGDIKGCFDNIDHTVLLNLLSEKIKDSKFINLIGKFLKAGYMDNWEYHKTYSGTPQGGILSPILANIYLHELDKKVEAMQKEFNAPADYAYTPAYGKKVRGIVKLQKRYGECVDEAEKKELLKQIHKLEVEKRRLPYKDASDKKIAYVRYADDFIIGVSGSREDAERIKQELTLFVATRLKLELSDEKTKITHSSGNAHFLGYDINVRRCQESKRKTNGVLQRTLNNSVELLIPMERIEKFMYDREIVIQGKDGKLIPWQRNSMAGLTDLEIVDTYNSQTRGICNYYCIASNFSKLTYFVYLMEYSCLKTLAKKHKTRISGIKRIFKCGKSWGIPYKTKKEKKRMMIVKFSDFKRGTVFDEPSIDTVKNHIHFNTRNSLEARLKACKCELCGAEGDGIAFEIHHINKMKNLKGKEQWEMAMIARKRKTLVVCKECHKKIHHSS

SEQ ID NO: 8224 - protein, 596 aa, synthetic construct
KPTSEILERMYQNSAKHTNGVYTRLYRYLLREDIYLTAYKKLYANKGAGTKGVDNDTADGFGMEYVHQIIDELKNQTYMPKPVRRTHIPKQNGKMRPLGIPSFRDKLVQDVIRQFLEAIYEPIFSDRSHGFRPNRSCHTALKQISRSFRGAKWFVEGDIKGCFDNIDHAVLLNLLSEKIKDSKFVTLIGKFLKAGYLEAWQYHATYSGTPQGGILSPILANIYLHELDKKVEQLKQDFSRPAEKVRTTIYSTKAREIERVRKLYADCVSDEERKEVLDKIQKLKTEIRTLPYKDATDKKLAYVRYADDFIISVCGTREECEEIKQQLKSFLSEKLKLELSDDKTKITHSSENARFLGYDVNVRRNNECKRKGNGTIQRTLNNSVELLVPFEKIERFMFERKIVKQDKDGTLIPWQRLSMYGLTDLEVLDTYNSQTRGICNYYSLASNFAKLKYFVYLMEYSCLKTLAQKHKTRISAIKRKYKAGHSWGIPYETKNGAKKMMSIKFSDLNKSAIFNGEVDKITHHAHFTNANSLENRLKMKKCELCGADSNTTFEIHHINKLKNLKGKEQWERAMIARKRKTLVVCKSCHNGIHHSS

SEQ ID NO: 8225 - protein, 597 aa, synthetic construct
KPTIEILTRLQENSKNNHEEVFTKLFRYLLRPDIYYVAYQNLYANNGAATKGVDEDTADGFSEDKVNRIIEALRNGTYEPKPVRRTYIKKKNGKMRPLGLPTFTDKLVQDVIRMVLQAIYEPVFSNYSHGFRPGRSCHTALAQLKHEFIGAKWFVEGDIKGCFDNIDHSVLIGIVGKKVKDARFINLLRLFLKAGYMEEWKYYGTYSGCPQGGIISPILANIYLNELDTFVEKLKKSFDTNTPYTLTPQYRALQNKRANTKQKINRREVGEERDQLIAQYIGLGKELRKTPAKLCNDKKLKYVRYADDFLIAVNGSKEDCEWIKAQLTEFIRGTLKMELSQEKTLITHSNDCARFLGYDVRVRRDQQVKPWKNCKQRTMNNTVELLIPFRDKIEKYLFAKGAVKQRPDNGKLEPVARIGLTRNTDLEIVTTYDAELRGLCNFYYLASNYRNLNYFSYLMEYSCLKTLAWKHKCKLSKIYDKYRIGAKRWGIPYETKSGRKVRKLTKFNEVDGKRCEDAIPTIVTIIAKSRTTIDSRLKACRCELCGYEGKDRKYEVHHVNKVKNLKGKEPWEIVMIAKRRKTLVVCHECHQKIHHGY

SEQ ID NO: 8226 - protein, 596 aa, synthetic construct
KPTMEILTKLQENSKKHHDEVFTRLFRYMLRPDIYFVAYQHLYANRGAGTKGINEETADGFSEKYVEQIIEALRTETYRPKPVRRTYIKKSNGKMRPLGLPTFTDKLVQEVIRMILESVYEPIFSNNSHGFRSGRSCHTALTQIKNQFIGARWFVEGDIKGCFNNIDHTILTKIIGKKIKDARFIKLVHLFLKSGYMENWKYYGTYSGCPQGGIISPILANIYLNELDNFMEKIKQDFDNRTPYQLTAEYKKVMNKRSSLSQKIKRCEAGARRDGFIEEYNNLSQQIYKIPAKLCNDKKLMYVRYADDFLIAVNGNKQDCEWIKAKLTEFIHNDLNMELSQEKTLITHSSICARFLGYDVRIRRSQQIKAWKKTKQRTMNNSVELLIPLEDKIQSFLFSRGIVRQRKDNGKMEPFRRNSLLRQTDLEIVSTYDAELRGICNYYSLAVNYSKLNYFSYLMEYSCLKTLATKHRTKISKIISKCRMANKRWGIPYQTKSGMKRKRLTKIYEIDRKKCEDIFPRAITIYAKGKTTFDDRLKAKVCEVCGRTDSERYEIHHVNKVKNLKGKEPWEQIMIAKRRKTMVVCHECHQKIHHGF

SEQ ID NO: 8227 - protein, 598 aa, synthetic construct
KPTVEILTKLQENSKKHHDEVFTRLYRYLLRPDIYYEAYQHLYSNKGAGTKGITEDTADGFSEKYVERIIELLKAETYLPKPVRRTYIKKSNGKMRPLGLPIFADKLVQEAIRMILEAVYEPVFIDYSHGFRPGRSCHTALAQIKKEFTGARWFIEGDIKGCFDNISHAVLVEVIGRKIKDARFLKLIRSFLKAGYMENWKYHETCSGCPQGGIISPILANIYLNELDQYIMKLKKDFDVTAKAPYTPEYSRIIWKRQRLHNRIKDSEGMEREQLIDEYKSATAQMFKIPAKLCEDKKIKYVRYADDFLIAVNGSRQECEVIKGQLTEFVHNTLKMELSQEKTLITHSNTPARFLGYDVRVRRDQQIKPKGRFKTRSMNNKVELNIPFKDRIEKFLFANGIVEQRKDNGKLEPCKRPQLLNMTDLEIVTVYNAELRGICNYYGIASNFNKLIYFNYLMEYSCLKTLANKHCSKISKVREMYKDGTGEWGIPYQTKKGMKRMYFAKYSDCKGKRFTDIIPQQAKNHSHNTTTFESRLKAKACEICGCTDSDKYEIHHVNKLKNLKGKTKWEQVMIAKRRKTIVVCHKCHMVIHHGGKKE

SEQ ID NO: 8228 - protein, 597 aa, synthetic construct
KSTMEILTKLQENSQKNQDEVFTRLYRYLLRPDIYFIAYQHLYSNKGAGTKGVNDDTADGFSEQYVTAIIEALRTGSYEPKPVRRTYIQKKNGKLRPLGLPVFADKLVQEAIRMILEAIYEPIFSIYSHGFRPGRSCHTALAMIKHEFTGAKWFIEGDIKGCFDNIDHSTLIGVLNRKIKDARFLNLIRMFLKSGYMEDWDFHETYSGCPQGGIISPILANVYLNELDRYITQLKKEFDHGYNPRNFTEEYNAIRHKRDALHEKIKKAEGTMREQLIAQHKQLTKQLFRTPAKACTDKRLKYVRYADDFLIAVNGTREECEAIKAKLTDFVRDTLKMELSQEKTLITHSNTPARFLGFDVRVRRDASVKRSGKRKMRTMNNKVELNIPLKDKVETYLLSHSIAKRDRKRLIPIHRPILLNRTDLEIVMIYNAELRGLCNYYAIASNFNKLVYFGYLMEYSCLKTLANKHRSRISKVRYEYRDGTGAWGVPYETKKGKRRMMFAKYSDCKGKDLTEKVPDLAYRYSHNTTSFEERLKAKVCEVCGCTDSDSYEIHHVNKVKNLKGKADWEKVMLAKRRKTIVVCHKCHMRIHHGTKTE

SEQ ID NO: 8229 - protein, 594 aa, synthetic construct
KPTTEILVNISKNSSKNKDEVFTRLYRYMLRPDLYFIAYKNLYANKGASTQGIDNDTADGFSKEKIDRIIQSLSDESYQPKPVRRKYIQKKGNSKKKRPLGIPTFTDKLVQEVLRMILEAVYEPIFSNNSHGFRPEKSCHTALNSIKKEFTGTTWFVEGDIKGCFDNINHHVLVDIIGRKIKDARLIKLVWKFLRAGYIEDWKYHTTYSGSPQGGIISPLLANIYLNELDKFAEKTAKAFYKKRDREHTKEYDAVMNALVLVKYHLKKATGQQKSDLLKQKKRLQRQLRKIPCSSQTDKVMKYVRYADDFIIGVKGDKIDCEKIKKQFADFISQELKMELSEEKTLITHSSQFARFLGYDIRVRRDNTVKPHGTHLQRTMNMKVELCIPFQDKIMPFLFNKSIIRQLKDGTLEPIARKYLYSCTDLEILTAFNAELRGICNYYALASNYNRLRYFAYFMEYSCLKTIAGKHKTTARKIISKYSYDGSWRIPYKTKEGIKYSKFADFMKCKKVTDFDEVIKDYAVMHASTRTTFEDRLSAEVCELCGKINAPLEIHHVNKVKNLKGKDFWEIMMIAKKRKTIAVCKECHHKIHHP

SEQ ID NO: 8230 - protein, 595 aa, synthetic construct
QPTIEILDRIRKNSRDNKEEIFTRLYRYLLRPDLYYLAYKNLYANKGAGTKGVNDDTADGFSKEKVDRIIQSLADGTYTPNPVRRKYIQKKQNSTKKRPLGIPTFTDKLVQEVLRMILESVYEPIFSNNSHGFRPNRSCHTALKSLKREFSGVSWFIEGDIKGCFDNIDHQVLANVINAKIKDARLIQLIWKFLKAGYMEDWQYHATYSGCPQGGIVSPILANIYLNELDKFVEKTAKEFYKSRDRHHTPEYDKVTWQIKKAQKQLKTATGQEKTALLQKIAQLKAVMHKTPCMSKTDKVIKYIRYADDFILGVKGDKADCGRIKRQLSDFISQTLKMELSEQKTLITHSNQYARFLGYDIRVRRDQKLKPHGNHVSRTLNGSVELCIPFADKIMPFLFGKSVIRQLRDGTIEPTARKYIFRCTDLEIVSTYNSELRGICNYYSIASNFNKLQYFEYLMEYSCLKTLAGKHESTSRKMMRKYRDGNGSWGVPYQTKAGIKRRSFARFMDCKNTDLWTDKIIDFAIAHIGSRTSFDDRLSARVCELCGKTNVPLEIHHVNKVKNLKGKQLWELAMIAKKRKTLAVCKDCHHKIHHP

SEQ ID NO: 8231 - protein, 596 aa, synthetic construct
QPTTAILDRIMRNSRKNNEEIFTRLYRYMLRPDLYYLAYNKLYRNKGAATKGVDDDTADGFSEEKINRIIQSLADETYMPKPVRREYIPKKRSSTKKRPLGLPSFTDKLVQEVLRMILEAVYEPTFSDFSYGFRPHRDCHTALKALKKEFTGVSWFIEGDIKGCFDNIDHQVLVGVISSKIKDARLIKLIWKFLKAGYMEEWKYHTTYSGCPQGGIISPLLSNIYLNELDKFAEKVARAFYKPRDRVRTPEYAKIQCKKDYAQKLLKTATGQKKVELLKRVKSLKSELRKVPCSSKTDKVMKYIRYADDFIIGVKGDKSDCEHIKRQFSDFISEHLKMELSEEKTLITHSNQYARFLGYDVRVRRDGKVKPTDRCLKRTLNYTVELNVPFADKIMPFLFDKAIIKQTHDGKIEYIARKYLYRCTNLEIIDTYNSELRGICNYYSIASNFTSLNYFAYLMEYSCLKTLAGKHKSTSRKIREQFRTGSGDWGIPYNTAKGQQKYRTFAKYMDCKDSDRFNDVIVECAIRHAGTRTTLEKRLSAGICELCGKTNTPLAMHHVNKVKNLKGKQQWEIVMIAKRRKTLAVCKDCHYKIHHP

SEQ ID NO: 8232 - protein, 605 aa, synthetic construct
KPTMEILERIKKNSEENKDEVFTRIYRYLLRPDIYFVAYQNLYSNNGASTKGVDDDTADGFSEAKIERIIKCLEDESYQPKPFRRVYIKKPNGKMRPLGIPSFTDKLVQEAVRIILEAIYEPIFMDTSHGFRPNRSCHTALQSVKYEFRGARWFIEGDIKGCFDNINHNVLVSCINKKIKDARFTKLIYKFLKAGFVDDFVYNNTYSGCAQGGIISPILANIYLHELDKFVENLSKEFNEPATEKFTADYRKAQNAMAVTRKKIKKAENADDEVEKAELLKVYKSQRATLLKTPCKSQTDKKLKYVRYADDFIIGVNGSKVDCVRIKQQLSDFISNTLKMELSEEKTLITHSNTYAKFLGYNIRVRRSNTVKPNGRGATQRTMSNGVELAIPLKEKINGFMFKNGIVKQCDNGELEPVCRNDMLRLTDLEIVSGYNAELRGICNYYYMASNFYMLNYFSYLMEYSCLKTLAGKHRCSIGKIKEKFSDHKGKWCIAYETKKGTSYLYLSKYSDCKKGKNATDTRTSMVQIHKNTRSTFESRLKAKCCELCGSTTSNQYEIHHVNKIRNLKGKEPWEIMMLSKRRKTMVVCWECHKKIHNQNFEVKQ

SEQ ID NO: 8233 - protein, 602 aa, synthetic construct
AEMQPTTEILTRISKNSLNNKDEVFTRLFRYLLREDIWFEAYRNLYANNGASTKGVNDDTADGFSERKIQKITEQLKNGKFNPTPVRRTYIQKKNSDKMRPLGIPTFTDKLVQEAVRMILEAVYEPIFHECSHGFRPNRSCHTALKSLRMKFTGAKWFIEGDIKGCFDNINHDVLIGILNKKIKDARLIQLIQQFLKAGYLEDWIYHRTYSGTPQGGIISPILANIYLHELDKFVENLKEEFDKPSKEKYTLEYRKAKYQTEKARKAIRECDPQDYERKKQLIKNLKAVRSVQLKTPCKSQTDKKIQYIRYADDFILSVNGSREECIEIKKKLSQYISEVLKMQLSDEKTLITHSSNHARFLGYDISVRRNAKIKSKNGGVSLRTLNNKVELLIPLKEKINRFMFDKGVIFQKKDGSLFPTHRSYMIHMSDLEIISTYNSELRGICNYYNLASNYCQLRYFAYLMEYSCLKTLAAKHNTKISKIIAKFKDGKGGWGIPYETKSGKKRCYFAKYSDCKDSKDGTDNISNAAVIYGYSRNTLEERLKAKVCELCGDTNAEYYEIHHVHKVKDLKGKNDWERAMIAKRRKTLVLCRNCHHKVHNQ

SEQ ID NO: 8234 - protein, 602 aa, synthetic construct
AEMLPTTEILTRISKNSLKNPNETFTRVFRYMLRPDIWFLAYKNLYANNGASTKGINNDTADGFSEKTISNIIKSLENGEFCPTPVRRTYIAKKSSDKKRPLGIPTFTDKLVQEVLRMVLEAIYEPVFMDCSHGFRPNRSCNTALKSLRLKFTGAKWFVEGDIRGCFDNIDHSVLIRLLNQKIKDERLIQLIYKFLKAGYMEDWTYHRTYSGTPQGGIFSPVLANIYLHELDKFIVNLKNEFDKPSAELYTVEYRKAQWQTVKARKAIKNCDPNNKIQKKQFIKEMKSVRSVQLKTPCKSQTDKKIQYIRYADDFIIAVNGSREDCVEIKNKLSLFISSALKMQLSEEKTLITHSSNYARFLGYDVCIRRNAKVKPKKGGITVRTLNNKVELLIPIKDKLNKFLFNKGIVYQKKDGTLFSTHRTSLIRLSDLEIVSTYNSELRGICNYYSLASNYCQLRYFAYLMEYSCLKTLAAKHNSYISKIINKFQNGKGEWGIPYETKQGPKRCYFAKYSDCKSGKDYTDKITKAAIIYGFSRNTLEERIKAKVCELCGKTNADHYEIHHIHKVKDLKGKADWERAMISKRRKTMVLCRNCHHKIHNQ

SEQ ID NO: 8235 - protein, 599 aa, synthetic construct
KPTTEILARISQNSLANKEEVFTKLYRYLLRPDIYFVAYKNLYANNGAATKGVNEDTADGFSEAKIDSIIKALADETYQPMPVRRTYIQKKNNRKKLRPLGIPTFTDKLVQEVLRMILEAVYEPIFLDVSHGFRPKRSCHTALKQLRREFNGTRWFVEGDIKGCFDNINHAVLVGLLSNKIRDARITKLIYKFLKAGYLENWQYHKTYSGTPQGGIISPLLANIYLHELDKFVMKLKSEFDTPGVGQITPEYRELHNEIKRLSHRLTKVTGEEREMVLAEYKPKRQKLMTIPCTAQTDKKLKYVRYADDFLIAVKGNREDCQWIKSKLAEFIGDTLKMELSEDKTLITHSSKCARFLGYDVRVRRSGKIKRGGPGHVKMRTLNGGVELLVPLNDKIRQFVFTKGVAIQKEDGSMFPIHRKYLVGLTDLEIVSVYNAELRGICSYYGMASNFCKLHYFSYLMEYSCLKTLASKHKTSLSKIIDKCNDGTGKWGVPYETKLGSKRRYFANYADCKGKGSATDYISNAAVVYGYAVNTLENRLKAKVCELCGTTESDHYEVHHINKLKNLKGKERWEIAMIAKHRKTLVVCRDCHRSIIHKK

SEQ ID NO: 8236 - protein, 598 aa, synthetic construct
QPTTEILARISKNSLANKEEIFTKLYRYLLRPDLYFLAYNHLYANNGAATKGANNDTADGFSEVKIANIIKSLSDDTYQPTPVRRIYISKKSDPKKKRPLGIPTFTDKLIQEALRMVLEAVYEPVFLNASHGFRPKRSCHTALTSLKKEFNGTRWFVEGDIKGCFDTIDHATLVGFVNNKIKDARIIKLIYKFLKAGYLEDWQYHKTYSGTPQGGIISPLLANIYLHELDKYVMKLKAEFDAPNTEKITPEYRELHNEIKMLSYYIKKADGTEKERLLAEYKPKRKRLMSIPCTSQTDKKIKYVRYADDFIIGVKGSQEDCQWIKSKLAEFISETLKMELSEEKTLITHSSECARFLGYDVRVRRSGEIKRGGPGNAKKRTLNNHTELLVPLNDKIHKFIFSKGIAIQKIDGTLFPVHRNSLLRLTDLEIVTAYNDELRGLCNYYGMASNFHKMKYLAYLMKYSCLKTLASKHKSSISKVIAMFKDGKGDWGIPYETKAGAKRRYFVNYIDCKEAKNPTDIISNAAVIYGQSVTTLEKRLKARVCELCGTAESDHYEIHHVNKLKNLKGRKQWEIAMLAKRRKTLVVCEKCHHEIHNQ

SEQ ID NO: 8237 - protein, 597 aa, synthetic construct
QPTTEILERISKNSLTHKEEVFTRLYRYLLRPDIYYQAYQRLYTNKGASTKGANQDTADGFSEAKIEKIIQSLADETYQPTPVRRTYIAKKNNPKKKRPLGIPTFTDKLVQEALRMILEAIYEPLFLDCSHGFRPKRSCHTALEKLKYQFGGVRWFVEGDIKGCFDNINHEALVGFIGNKIKDARIVKLVYKFLKAGYLEDWVYHKTYSGTPQGGILSPLLANIYLNELDQFVMKLKDEFETPEKGQITPEYRALHNKIKNLCYHIDRKQGVEKERMIAECKVLRKQLLKTPCTAQTDKKLKYIRYADDFIIGVKGSKEDCQWIKSKLAEFIGQTLKMELSEEKTLITHSSQCARFLGFDVRVRRCEKVKRNKKGAKMRTLNNHVELLVPFDDKIHDFIFSKKIAIQKKDGKLFPVHRNSLLRATDLEIVTVYNDELRGICNYYGIASNFCKLKYLSYLMEYSCLKTLAAKHKSKISKVVAMYKDGTGEWGIPYETKKKSKRRYFANYMDCKNAKNPTDQISNAAIIYGQSVTTLEKRLKARVCELCGTTESEHYEIHHINKLKNLKGKEPWEIAMLAKRRKTLVVCERCHHLIHNQ

SEQ ID NO: 8238 - protein, 599 aa, synthetic construct
KPTMAILERISKNSMEQKDEVFTRLYRYLLRPDIYYIAYQNLYSNKGAGTKGIDDDTADGFSEKKISTIINSLASESYTPKPVRRTYISKKSSSKLRPLGLPTFTDKLIQEVLRLILEAIYEPIFLDTSHGFRPKRSCHTALKMIKREFGGARWFVEGDIKGCFDNIDHQVLISIIQKKVKDARFIKLIYKFLKAGYMENWNYHKTYSGTPQGGILSPLLANIYLHELDLFVLKLKEQFDNPQKDNITSEYRQAHNELKRLSNRLKKVEGNEKQELLEEYLIKRQRLMTIPCTAQTDKKLKYVRYADDFIISVKGNKKDCHWLKQQLADFINGHLKMTLSPEKTLITHSSNCARFLGYDIRVRRSQAIKRGGSGQVKKRTLNGSVELLIPFKDKIHLFLFNKGIVIQKNDGSYFPVHRKNILTATDLEIVTIYNSELRGICRYYGLTSNFNQLNYFAYLMEYSCLKTLASKHKTSLVKIRAKYKDGFGSWAIPYETKTTKKRMYFTDYTKCKSPSTFTDLKSSVAVTYGYSRTTFESRLKAKKCELCGTTDKQTTYEIHHVNKGKNLKGKEKWEQMMIAKQRKTLVVCHHCHRHVIHNH

SEQ ID NO: 8239 - protein, 598 aa, synthetic construct
KPTMAILERISKNSQENIDEVFTRLYRYLLRPDIYYVAYQNLYSNKGASTKGILDDTADGFSEEKIKKIIQSLKDGTYYPQPVRRMYIAKKNSKKMRPLGIPTFTDKLIQEAVRIILESIYEPVFEDVSHGFRPQRSCHTALKTIKREFGGARWFVEGDIKGCFDNIDHVTLIGLINLKIKDMKMSQLIYKFLKAGYLENWQYHKTYSGTPQGGILSPLLANIYLHELDKFVLQLKMKFDRESPERITPEYRELHNEIKRISHRLKKLEGEEKAKVLLEYQEKRKRLPTLPCTSQTNKVLKYVRYADDFIISVKGSKEDCQWIKEQLKLFIHNKLKMELSEEKTLITHSSQPARFLGYDIRVRRSGTIKRSGKVKKRTLNGSVELLIPLQDKIRQFIFDKKIAIQKKDSSWFPVHRKYLIRSTDLEIITIYNSELRGICNYYGLASNFNQLNYFAYLMEYSCLKTIASKHKGTLSKTISMFKDGSGSWGIPYEIKQGKQRRYFANFSECKSPYQFTDEISQAPVLYGYARNTLENRLKAKCCELCGTSDENTSYEIHHVNKVKNLKGKEKWEMAMIAKQRKTLVVCFHCHRHVIHKHK

SEQ ID NO: 8240 - protein, 598 aa, synthetic construct
KPTMAILERISKNSQENIDEVFTRLYRYLLRPDIYYVAYQNLYSNKGASTKGILDDTADGFSEEKIKKIIQSLKDGTYYPQPVRRMYIAKKNSKKMRPLGIPTFTDKLIQEAVRIILESIYEPVFEDVSHGFRPQRSCHTALKTIKREFGGARWFVEGDIKGCFDNIDHVTLIGLINLKIKDMKMSQLIYKFLKAGYLENWQYHKTYSGTPQGGILSPLLANIYLHELDKFVLQLKMKFDRESPERITPEYRELHNEIKRISHRLKKLEGEEKAKVLLEYQEKRKRLPTLPCTSQTNKVLKYVRYADDFIISVKGSKEDCQWIKEQLKLFIHNKLKMEFSEEKTLITHSSQPARFLGYDIRVRRSGTIKRSGKVKKRTLNGSVELFIPLQDKIRQFIFDKKIAIQKKDSSWFPVHRKYLIRSTDLEIITIYNSELRGICNYYGLASNFNQLNYFAYLMEYNCLKTIASKHKGTLSKTISMFKDGSGSWGIPYEIKQGKQRRYFANFSECKSPYQFTDKISQAPVLYGYARNTLENRLKAKCCELCGTSDENTSYEIHHVNKVKNLKGKEKWEMAMIAKQRKTLVVCFHCHRHVIHKHK

SEQ ID NO: 8241 - protein, 596 aa, synthetic construct
NPTSEILERVNKSSSEHHDGVFTRLFRYLLREDIYFAAYQKLYANSGAMTPGSDNDTADGFSAEYVHELIEELRSGKYKPKPVRREYIKKQNGKMRPLGIPSFRDKLLQEAVRMFLEAIYEPLFYDQSHGFRPERSCHTALDQIKTNFRSVKWFIEGDIKGCFDNIDHAVLIKTLEVKIKDSRFINIIRAFLKAGYVEDFQYHTTISGTPQGGIISPILANIYLHELDRKVMKLKEKFDKQSTRHQTPEYLHLAKRRQTLQKKIDRVKGEERELAIKEYKAVCNQKLKTPARMSDDKKLVYCRYADDFLIGISGSREDCEEIKEILREFLSTQYHLELSAEKTKITHSAERVRFLGYDVAVRRSQKIKKKANGVKQRTLNNSVELTVPLEDKIMQFLFKNDIIGQKPNGEIWAVCVPRLRHLSEVDIVNRYNAQIRGICNYYCLAANYDKLNYFRYLMEYSCLKTLASKSNSTTRKIIQKYRHDGKWAIPHEVKGGIKYAKLVSLADCKAGKLMSDKDPWQYKSFDPKKLSQYVRLSAGVCELCGDNSDSCCIYHAGKMKNLKSTTEWGKKMLHMRRKTLIVCPKCFKKIHREQNK

SEQ ID NO: 8242 - protein, 595 aa, synthetic construct
KPTFEILERIEKCSTKYVDGVFTRIYRYLLREDIYHAAYQNLYANKGATTKGIDEDTADGFSNEYVQELINSLKDGSYKAKPVRREYIPKQNGKLRPLGIPTFRDKLLQEVVRMILEAIYEPIFHKNSHGFRPGKSCHTALKQIKTEFTGVVWFIEGDIKGCFDNINHNKLIEILGRKIKDSKFLNIIRQFLKAGYIENWQYNATYSGAPQGSICAPILANIYLNELDKKFDEISTHFDKPSSAYKSPKYHEVDKEMKRLSYWIDNTTDEEERQELIKQYKEQKKSLRTLPCKNKDNKRFTFVRYADDWLVGVCGTKEDCKDLKEEIAKFLDEELKLTLSEEKTLITHSSEKVRFLGYDISVRRNKQVKGHKMKNGKWRQSRTLHMKVALTIPHSDKIEKFMFDKGVIRQKENGEIQPIHRAGLLNLSDSEIVEHYNAEARGLCNYYKLAVDYHTLGYFCYLMEYSCLKTIANKHKTSIRKIINKYKDGKTWSVPYETKAGTKRVKPVKIADCKGGKVEDIIFVRKKFNWKTTIRQRLNAKTCELCGCKNAELYEVHVVKNLKDLGDSNWEQAMKEKRRKTLVVCNKCHKEIHEH

SEQ ID NO: 8243 - protein, 598 aa, synthetic construct
KPTSEILERIAKSSTEHKDGVFTRLYRYLLREDIYYAAYQKLYANRGATTKGIDDDTADGFSAHYIKELIHDLENGTYRANPVRREYIPKKNGKMRPLGIPSFRDKLLQEVVRMILEAIYEPVFDDHSHGFRPNRSCHTALRQISSDFTGVVWFIEGDITGCFDNIDHEILIDILARKIKDSKFLNVIRQFLKAGYVENWKYNKTYSGTPQGGIVSPILANIYLNELDKKFNEIKRRFDEPRTSRHEKTPKYREIDNEMKKISYWIDHTDDDEKRKELVKQFKQLKKEIHTIPCHPQTHKKFTFVRYADDWLVGVCGTKEECIALKAEIADFLSKELKLTLSEEKTLITHSSEKVRFIGYDICVRRSQEIKGYKMKNGKWRKSRSLHLKVALTIPHTEKIEKFLFAKKAIIQTNGGALKFKPVHRTALLNLSDSEIVEHYNAEMRGILNYYNLAVDYHTLDYFCYLMEYSCLKTIANKHKTSIRKIVRLYKDGNTWSVPYETKEGTKRVRPIKIADCKRGEASDIVFQRTKFNWKSTIRQRLNAGVCELCGKKHADLYEVHVVRNLNELGNSDWELAMKSKRRKTLVVCSDCHRRIHK

SEQ ID NO: 8244 - protein, 596 aa, synthetic construct
KPTSMILERIAKSSTEHKDGVFTRLYRYLLREDIYFAAYQKLYANKGATTKGIDNDTADGFSSKYVNDLIQELKNGTYQANPVRRVYIEKKNGKLRPLGIPSFKDKLLQEVVRMILEAIYEPVFDKNSHGFRPNKSCHTAMKQISSEFTGVIWFIEGDIKGCFDNIDHQILINIIAKKIKDSKFLNIIRQFLKAGYIENWKYNATHSGTPQGGICSPILANIYLNELDNKFREIQGKFNKARTIEEIKTLEYRTIDNEMKRVSYWINHTENEQERNNLIKKYKALQQEIHKVPCHTKNNKKFTFVRYADDWLAGVCGTKEECVMLKAEIAKFLTEELKLTLSEEKTLITHSSQKVRFLGYNINVRRSKEVKGFKMKNGKYRKSRTLHYKVALTIPHKEKIEKFLFSKGVIMQKANGEIKPIHRTVLLNLSDKEILEQYNAEMRGILNYYRLAVDYHTLNYFCYLMEYSCLKTIANKHKSSIRKIIREYKDKNTWSIPYETKTGIKRIRPVKIADCKKGVVNDVIYKRTNFSFKSTIRQRLNARTCELCGQTGNELYEVHTIKNLNELGNLNWEKAMKKMKRKTIIVCKECHNIIHS

SEQ ID NO: 8245 - protein, 600 aa, synthetic construct
KTTCEILERIQKNSTEHKDGVYTRLYRYLLREDIYYVAYQRLYSNKGATNKGATTKGVDNDTADGFGQVYVQELITQLRNGTYKPKPSRRVYIEKSNGKMRPLSIPSFRDKLLQEVVRMFLEAIYEPIFSDYSHGFRPNRSCHSALKQAKIYFTGAKWFIEGDIKGCFDNINHKVLINILERKIKDSKFINIIRLFLTAGYVDDFKYNATYSGCAQGGIISPILANIYLNELDKKILEIKNKFDKPHQAKYTKEYSHIKSKRDYQKSKLKNCDEEQRKEILRTIDDLNKKLRKTPRTPNDDKNIYFIRYADDFLIAVKGNKNDCEIIKKEIHDFLRDELKLTLSEEKTLITHSSNKALFLGYNISIRRSQTVKSVSQNGRKYKQRTLNNSVALTVPFERIEKFMFKRRMIKQIKPKTFRPLHRKGWLYLPDYVIVERYDAELRGILNYYNLAVDYNYLGYFRYLMEYSCLATIAGKHNSSTSKIVSQYRHGKYWGVPYLTNKGEEKIKRLARLKDCKSNACNDTIVKHRYVKATNASIRDRLQTGVCELCGKRIDVPLEVHIVSKLKDLKDDKPWKVVMKSKRRKTLVVCPECHKHIHVE

SEQ ID NO: 8246 - protein, 592 aa, synthetic construct
TKPTSDILERIYKNSSEHKDGVYTRLYRYLLRDDIYYLAYQKLYSNKGASTKGIDNDTADGFGKKYVDSLIKELSDGTYTPKPVRREYIKKKNGKMRPLGIPSFRDKLLQEVIRNFLEAIYEPTFSDFSHGFRPKRSCHTALEQAKLYFRGAKWFIEGDIKGCFDDIDHDKLIEILQRKIKDSRFINVIRSFLKAGYMEDWKYHQTYSGCPQGGILSPILANIYLNELDNEIAKIKQAFDKPATRKITPEHSSLSAKLFKRRKKLKSATGEQRTALLSEIHDLEEQYRKTPSKMQDDKKVSYVRYADDFLIAENGSKEDCVRLKEQLAKFLFDEYKLTLSKDKTLITHSSERVRFLGYDISVRRNQEYMTDSRGRKARHLNNTVALSVPFEKIEKHMFEKGFVRQTEAKKFRPLHKKGWLYLPDAEIVERYNAEIRGIVNYYYLASNLYKLQYFAYLMEYSCLATLAGKHNSTIKKIVAKHKQGKDWAIKYKTENGATKEKRIVKLKDCKGKCEDKIVQHRYSVNTNATIRARLQAGICELCGSKDKASYEVHHVPSVKGLDGTSLWEQIMKSKRRKTLVVCEDCHKAIHDD

SEQ ID NO: 8247 - protein, 590 aa, synthetic construct
KPTAEILERINKNSNEHKDGVYTRLYRYLLREDIYYSAYQKLYSNKGASTEGIDNDTADGFGKKYVESSIEELSNNTYKPKPVRREYIKKSNGKMRPLGIPSFRDKLLQEVMRRFLEAIYEPIFSDFSHGFRPNRSCHTALKQTLPYFKGARWFIEGDIKGCFDNIDHDKLIEILQRKIKDSKFINIIRSFLKAGYIEDFRYNQTYSGTPQGGILSPILANIYLNELDNKIMEIKQNFDKPATRCVNPTYDEIRGKRYWLQQKLKNATDEEKPVLISRINEYSKKLLKLPYKSQTDKNIAFVRYADDFLIAVRGNKEDCIKIKEQLREFLNDELKLTLSDEKTLITHSSEKVRFLGYDISVRRNQQISTNSLGHKKRQLNGTVELLVPLEKIEKFMFDKGIIRQSKAKKFHPIHRKGWLYLPDQEILERYNAEIRGILNYYHLANNYNKLNYFQYLMEYSCLATLAGKHNSSISKVIDKYKSGKGWAIKYKTEKGKTREKRIVKLQDCKGFCDDNIVRHIYSVNTNATIRARLQAGVCELCGSRGKSNYEVHHVSSVKGLEGNKLWEQIMKIKNRKTLVVCEDCHKAIHS

SEQ ID NO: 8248 - protein, 297 aa, synthetic construct
LERALQQMRERADWRYLQSETQYVPWRAPGVDNMTLAYAADHLDEIITQRLERLSCLPYGPLPAKRYYIEEGSKQRPIAIMTVPDGIVSRALLELVREPLEEPLPPCNFAYLQGIGPQRRVDHITSMVEQYGWVVQLDIRSYFDSIPHDLLYERIDRLIVDPDLLALLWEFVTQPIRENGCDHATTVGVPQGGVISPVLANLYLSPLDEAMLAEGWGYARYADDFVIFTSTKAEARRARDYATEIIAELGLQVHRTGRKQAIIAKDCDGFEFCGHFYKWYGDRVYVAPRRSKIEEVV

SEQ ID NO: 8249 - protein, 325 aa, synthetic construct
ETSVRHLGELTYPLRASAAFQRQALTGEPDLLTEIAAPDSLLNAWRYVFTRDAKDGYLLQQSQQIAADPDRFVAALSGALLSGRYQPEPQVEVLIPKKGKTSAMRELSIPSIRDRVVERAVLNAIIDRADLLQCSASFAFRRGLGVQAATHEITQLRDSGNRYVLLTDIANYFGRINIADSLRVLQRGLFCSRTLALLRFIAKPRRVVGRRRIRSRGLAQGSCLSPLLANLALTDIDFALADTGVGYVRFADDILLCAPSRTELAASQRLLASLAAHQGLQLNEEKTMHTSFDAGFCYLGVDFTAHQPVTDLHYGVKHTKQPAKV

SEQ ID NO: 8250 - protein, 329 aa, synthetic construct
WFADEPRHTRGGSRMADLYRQVRLMKTLSSAWRVVRASCMQSSSSEIRNEAIEFEADSFRQLKSIQSKLQKKKFEFLPQHGIAKKRPGKSSRPLVIAPIPNRIVQRAILDVLQDNVAYVQEILKVETSFGGIKGKNVALAIAAINKAFSNGVTHYVRSDIPSFFTKVQRAKVVDALAKNIDDVDMVNLFSAAIETTLGNLTDLQRRGLESIFPLSHDGVAQGSPLSPLIANIYLAEFDREMNREGLACIRYIDDFVIMAASEKQVMKGFRAAKAVLRRQGLQVYSPDDDPLKASKGDVRDGFDFLGCYVKPGLVQPSKFARNRLLEKID

SEQ ID NO: 8251 - protein, 311 aa, synthetic construct
ATYDNFLLAWQRTVNTTSRMIRDELGMKIFAHNLQTNLEYLVQQVKAKDFPYKPLADHKVYVPKPSTTLRTMSLMAVSDVIIYQALVNIIADKAYSYLVTHENQCVLGNIYSGPGKRWMLRPWKKQYTRFVDCIENLYHAGNPWIASTDIVAFYDTIDHARLLSLIRKYCGDDQQFQELLQECLAKWAVHNSNITMGRGIPQGSNASDFLANLFLYEIDKEMIVNGYHYIRYVDDVRILASDKSTVQRGLILFDLELKRAGLVAQVTKTSVHEIEDIETEISRLRFIITAPTRNGNCLLVTLPSLPKSEQA

SEQ ID NO: 8252 - protein, 324 aa, synthetic construct
DAEYLKSVWKSDIRPLLRQAKFSNSRYAIDPLHYAAYEWNLDAFVDGIVRDLKLHQFTPERGEVIRAAKGTGLTRPVCELSPRDALVYTAIVKRVEDQLLVSSRKWVGHTRSDKGSSVETGDGAVDSFDWFQFWLRRQGLIADILEIDGVKFIVESDISNFFPSIRLEHVREHLLAHTRLSKELVRLCMQMIDGVLPRSNYLDYSHLGLPQGNNDSSRAIAHSFLAPIDQEFDVEGLAGRYTRYMDDVLYGVRHVAEGEKIISRLQRSLESLALTPNSAKTKIVPVDEYLRDSMVESNAEIERIQSLLESSGALGGSTEPEAKL

SEQ ID NO: 8253 - protein, 281 aa, synthetic construct
AVWENIVEAERISTNRKMRNPGVIRHIGNRWRNLIEIQQFVLNGTMRTDEYQHEQRVSGQDKLRDIAKLHFHPSHIQHQLITMAGNRRIDRSLIRHTYASRKGYGQILCATEMKKSLSKYRRTERWYGQGDVCKYYDNIPHSLIREDLERLFKDKKFVDTFMEPFERFAPEGKGIPLGIRPSQSIGNLTLKDFDHFMTEENKCADYKRYLDDFMFTGATKGEVKRKMKRAIKYLHDLGFNTHEPKIHRISEGMDMLGFVYYGVKNDMWWRKSDKKRWLRHR

SEQ ID NO: 8254 - protein, 326 aa, synthetic construct
AYDYYLHRKEKRDQKSGKSSNVITLKQIADHEYLLYCFQELRRYGGLGAGKDDISYFDISTSDCAKVFRKLSESLLRGRYRPQFPRKVPIPKPGTDEKRTLKINSIFDRSVSMALDKTLAPQLEKLFLEGSYGNRTNRSPWKMLAQLKKTVEETGRWVLAIEDIRKAFDNVKVKDIVKTHQQAQLELKEKHGIKINDSVVNLISTIAKGVTQKRKKGIDQGSNYSPQSLNVLLHYIHDVPLNAEVAFPLWYRYVDNLTYLCKSVSEGQRVLIKVRQVLNSASLKLKGEDGIVDLRKTTSSLLGFKLRRSNNQLIYLIAPRSWENLK

SEQ ID NO: 8255 - protein, 319 aa, synthetic construct
SYFYKERRGKIYESYYGSIVTYNTTTSKMADSKELFSSFFKARMSLKKEFPYDEIAIKLFEYNLEDNINRFSKEILKGYKFNTDFIGYKVPKNEKDDRQKVMDNIFNTIAGASFLDIIGIVIDREFSSNCCGNRLNKKLNTEYSYEYFWYGWYYKFMKKAFNKVLNKNNYYLKLDIKSFYTNINQNILYDKIIKLIPYKDSRLKEFINSLIKRHIPYVNNGKGLPQGSLTSGFLANLYLDDFDKYFISKTNDGYMRYVDDIFIFGKTEEQIKELGKEAENKLKDLYLEINKEKTSMGDKSSLKNIYYDDKELDDFQKRL

SEQ ID NO: 8256 - protein, 307 aa, synthetic construct
ARLEAEGQHRQAKRLNRMYCKSFDTKLVAATDANKRLPAGQRAKRAELHEIAAGMDLRQTQGTATFRAEPKKKGYRPVVNFDLRGRTAQLVLKRAAKPFIKIRPDQYASDGGQPAACHRIIELAAQGYAWFEEIDVRSFYASIIPEGVTELLGDLPKEMTEANTLAKRVRASFMKTARDIPSDDLCKLRNEVRAGIPQGSALSPLVAEAVMSNVLDQATQGADWPDVQLVVFADNIAVLGRTKADVEDAAENLAGAFSRSQLGPFNLHRKPARSINQGFDFLSTRFIARNRRIRAEVAPAARLKRIH

SEQ ID NO: 8257 - protein, 392 aa, synthetic construct
PKGFSFKDTFTPIQRKESLIGLLGIKDIEKFESLLRDGVENAYYIKPPIKKKNGGERIVYAPNRMLKSILRKINNRIFNQINFPDYLYGSIPDKENPRDYILCAHQHCKAKILIKLDIENFFPTMKTKFVFNIFKDLFKFSDEVSNILTKLTTYDGFVPQGAPTSTYLANLYFYDCEPNKVNYLRSLGFRYTRLIDDITVSRLKKEGDWKFVETIISEFITQKELSVNKDKTQLLSANSPQSFKVHGLCIEETTPRFTKNERINIKTQVKRVVKTGYNRDNIRMQKNYHDVYFSVKGKITKLKRVNCPDYPLLKKLLAKHCDPLPEHKEIKRINRVISNLSKDHATFGSTERYRSRYFQVIFRLEILKKLYPVEANEFKARLKLISPIKNEN

SEQ ID NO: 8258 - protein, 263 aa, synthetic construct
IYKGSKIDSLDKLSEVLSIDIDELTNVLLLEDEAKYKAGFIKKSNGKLRNIYNPNTSLRKIQRRIKNRIFTQQIEWPDYIFGSIPADEISSNDYVASAEKHCGARALLKLDIEDFFDNITQELVEKIFKNFFKYNDELSKILAQLCCVDGKVPQGGITSSYIASLALFSIEERLFFRLKNKKLIYTRYIDDITISSKNSEYNFDSIIKIVEGQLNSIDLPLNIDKIKVERFSSKALKVHNIRVDLKTPKFDKIEVKNIRAAIH

SEQ ID NO: 8259 - protein, 255 aa, synthetic construct
TQLNVDELASFVGTNAQTIQTITNKTTSYYKSFELKKRSGGSRTILAPKQQLLSIQKKIATTLEKIYPVSIYSHGFIYKKGIKTNAEEHLRSTELLNFDIDNFFDNIPEYRIFGIFRYYFNMNNYISGILKELTCVERHLPQGAPSSPILSNIICYKIDKDLGKLARRNHCKYTRYVDDITFSSKRKLPSSIYNRINKSCSNNIVKILSDSGFTINHRKTRLLTKSQRQEVTGITTNKQLNVSKTYIRSTRAMLY

SEQ ID NO: 8260 - protein, 331 aa, synthetic construct
RWDESKKRRAENKKKREAENKQRREAWDIYRKKTVVHAGEGVSSGLQDVLSDTDALVARGLPVMHCAADVAVMLGLPLPTLRWLTFHRRATALVHYHRFDIPKKTGGRRLISAPKATLKKAQQVVLDNILSRLPTEPEAHGFVAQHSIVTNAACHAGKAVVINVDLKDFFPSIGFRRVRGLFQRLGYSGQVATMLGLLCTEPPRIKAELDGKVFHVALGERVLPQGACTSPAITNTICRRLDRRLVGLASKHGFTYSRYADDLTFSGNVPKKAGRLLRSVRAILENEGFAENGKKTRVMRQSRRQEVTGLTVNDKPRVSREQRRELRAILH

SEQ ID NO: 8261 - protein, 374 aa, synthetic construct
LVETFGSINNIKNALLDYFEYYECEKNKELVIMSILIRKELCTLDLASPFEYSIIDVIGSMSYFIEKLKTRVAFHQNYERLRYAPIKRWRARKRFSAYELFGMDIMEMRQMQSLFGYNKKKSVISKNLLINGKKRKIKMYSCTSEGFALRSFHLKLMKQLQKLIELQPYSYAYRKDRSIFMCMNQHIDSKFFLKIDIKDFFNSISKGKMNKILKCHFCYDSKQAYEDNVIRRRSRYLGEYVKEWLGIKEITDICFVNGRLALGMVTSPILSNIYMDFFDERFHDNYPGLIYTRYSDDILISSGKWFDYKSILNFIAKELCYLELEINEHKVGFYKLKQAGDHIKFLGLNIVQGPEENYITVGKQYIKDVCSNIS

SEQ ID NO: 8262 - protein, 284 aa, synthetic construct
YRSYDIKNIEEVKVRLLQAENYTKSIESSLKFNIAHTKGRALYFPQDYETEIIIRKANTNIKKILGINPVSRNDIIRHLKEILREGVPYVIGRYDIKRFYDNIKISALNQNLDESLSTTYDTRRLVSGFLSSHEALYSSGLPTGISLSATLSELYLRNFDRGIKALPWVRYFARYVDDIIIIAEPRTTAQLMESALISGLPDGLALNSGKDKRYFRKLERDFGGAGPEADFDYLGYRFKVDKILKKSSDCGTLASRKVTVDISEKKVKIRKTRFIYAVHKYLAD

SEQ ID NO: 8263 - protein, 312 aa, synthetic construct
KGKKEKKKGAFFSSIEEVKKLKFDFVVSRISAHTKSDLLVEPTGYYDLEWFVKNRRSDLFNVIHSFYSPSKKITLNMPKGNFSYRPVSYLLPMDSLIYLAVTEKLIFYTKDKFSKFVYSNLLNPFDKKEVFSEPVKHWLRMRNTIRSNYKTNSLDKYYSADISGYFENIKIKYLLKKAKFYIGKHEVSYTKYLKKLLEKWQYADSQGLIQPHPASSILGKIYLSPVDSYFSYLGKRYSRYVDEFHIQTDDLSEMLNITIHLNEQLRELGLNLNSKKTIFKIGKDIWDEINENQDFFSAVDYAQRIRKKDELA

SEQ ID NO: 8264 - protein, 310 aa, synthetic construct
SGTPESKQSQPGGRKPPLMCHPAITYDAMCSLAGLQRAQISLIEELKRRGEGSKHALSYEDLTELGALLRSHQYSHRPCRLMTIKVGSKKRDIDSPDWLDRIVQRTYVDTIYPLVQQMACDSSHAYLYKRSIHTALWRLIMNIEHFGYSHVFRTDIESFFDSIPHAEMERVIDLHIRDIELNAFSHELLRVAEGFKNSKVGLPTGWLIPPLWANMLLTPVDARLESAGLKFFRYGDDYGILQRSKQEAEFAQGLLESALKPLGLHLKPGYSHKTYTRKLEDGLIVLGHEIRRINNRLTVAISKNSLAETR

SEQ ID NO: 8265 - protein, 278 aa, synthetic construct
CIGDIESAAWRAFRGHSRKPEVRAFQESMSSNCAFLYDSLRDGSWQNLMVYRQLTKTNNNGKVRQIDSPSLVVRIYQHLLLNLLEPHYFRKDNLNGLNCKPGCGITSAIPSRSVIHRLKHIFYDRRDLHYCLTIDQRQCYDHITPKVFRKALKQMVDDKWLVDFAVDVCFVDGRLPIGTPTSPFVHHVVMLEFDYFVKSLSSASVRYADDNFLAFATKEEAQAAKWRIKNWWWFRLGMRAKRGSAVVRPLSEPCDFCGYVFHRVDGMGICDHNKGYVK

SEQ ID NO: 8266 - protein, 324 aa, synthetic construct
RAARNNSAPGPNGVPYLVYKRCPKLLARLWKILRVIWRRGKVAHQWRWAEGVWVPKEEKSTLIEQFRTISLLNVEGKIFFSILSHRLSDFLLKNQYIDSSVQKGGIPGVPGCLEHCGVVTQLIREAREGRGSLAVLWLDLANAYGAIPHKLVEMALARHHVPCSIKTLIMDYYDSFHLRFVTSGSVTSEWHRLEKGIITGCTISVIIFALAMNMLAKSAEPECRGPITKSGIRQPPIRAFMDDLTVTTTSVPGCRWILQGLERLMTWARMRFKPGKSRSLVLKAGKVTDRFRFYLGGTQIPSVSEKPVKSLGKMFDGSLKYAFS

SEQ ID NO: 8267 - protein, 338 aa, synthetic construct
QVDWDEINEMLYERQWQKLGRGASTKTRIAQDKTIIDLREMSVNGTRLNLDTALKNLRRDMIDDWFFDPLQYVDLCNQDFVLDYFSSQDVREHYKFQEMEVLYIPKESLVQRKAMVGNFVDRLLYIAIVEKLAPLMEEYISSRVYAARLNRSEDNSLIANGVNQWIKMNYLIDEWLEKGVGCLFKCDVVNYFDNISHATLIGFLREIATDADALNAIKMLEQMFSEISDSQTNCGLPQNSDASSLLATFYLSHVDIQIQAQAIEYCRFMDDIYFMAPDYFSARNVLQSLEGELRRLNLCLNSSKVVCITLENKKEVDEFREGLSLYNHTNQKIKQLIR

SEQ ID NO: 8268 - protein, 357 aa, synthetic construct
IAFIHPKNNEKANAHWEYYRDFLHDTDRFAESIATIPLDEFKLLYEKAYWHQKIEFPAIDYIWRTIQGASNDKIEYLEYSLNYAFQSWYSGKFIDKGLEYSIPKQNPKKERRKVLLSPIDSIVEMKIIADIGPEIENIIDAKFRQGGPVSLGNRLDLKENSLVKKRNLFKYWPKQFRLRYFTILQQIQDKTDGYIVNIDVSDFYPSIPHQEMMKIIEKYLPKLSNFQKHWINDFLKTGEMSKDDGKGIPQGPPLSHVLANLYLYDKLDSKIIHGFLPKFYTRYVDDIVYVASSKKDAETFYKWIDHVINPLVKNKDKSYIVSNSEYLNTYKQHEIIELIRIKVEQVIQKVYLIAKIL

SEQ ID NO: 8269 - protein, 275 aa, synthetic construct
KEPDVSLGSTWLSDFPQAWAETGGMGLAVRQAPLIIPLKATSTPVSIKQYPMSQEARLGIKPHIQRLLDQGILVPCQSPWNTPLLPVKKPGTNDYRPVQDLREVNKRVEDIHPTVPNPYNLLSGLPPSHQWYTVLDLKDAFFCLRLHPTSQPLFAFEWRDPEMGISGQLTWTRLPQGFKNSPTLFNEALHRDLADFRIQHPDLILLQYVDDLLLAATSELDCQQGTRALLQTLGNLGYRASAKKAQICQKQVKYLGYLLKEGQRWLTEARKETVM

SEQ ID NO: 8270 - protein, 677 aa, synthetic construct
TLNIEDEYRLHETSKEPDVSLGSTWLSDFPQAWAETGGMGLAVRQAPLIIPLKATSSPVSIKQYPMSQEARLGIKPHIQRLLDQGILVPCQSPWNTPLLPVKKPGTNDYRPVQDLREVNKRVEDIHPTVPNPYNLLSGLPPSHQWYTVLDLKDAFFCLRLHPTSQPLFAFEWRDPEMGISGQLTWTRLPQGFKNSPTLFDEALHRDLADFRIQHPDLILLQYVDDLLLAATSENDCQQGTRALLQILGDLGYRASAKKAQICQKQVKYLGYLLKEGQRWLTEARKETVMGQPIPKTPRQLREFLGTAGFCRLWIPGFAEMAAPLYPLTKTGTLFNWGPDQQKAYQEIKQALLTAPALGLPDLTKPFELFVDEKQGYAKGVLTQRLGPWRRPVAYLSKKLDPVAAGWPPCLRMVAAIAVLTKDAGKLTMGQPLVVLAPHAVEALVKQPPDRWLSNARMTHYQALLLDTDRVQFGPVVALNPATLLPLPEEGLRHDCLDILAEAHGTRPDLTDQPLPDADHTWYTDGSSFLQEGQRKAGAAVTTETEVIWAKALPSGTSAQRAELIALTQALKMAEGKKLNVYTDSRYAFATAHIHGEIYRRRGLLTSEGKEIKNKGEILALLKALFLPKRLSIIHCPGHQKGNSAEARGNRMADQAAREIASKETPETSTLLIENSTP

SEQ ID NO: 8271 - protein, 677 aa, synthetic construct
TLNIEDEYRLHETSKEPDASLESTWLSDFPQAWAETGGMGLAVRQAPLIIPLKATSTPVSIKQYPMSQEARLGIKPHIQRLLDQGILVPCQSPWNTPLLPVKKPGTNDYRPVQDLREVNKRVEDIHPTVPNPYNLLSGLPPSHQWYTVLDLKDAFFCLRLHPTSQPLFAFEWRDPEMGISGQLTWTRLPQGFKNSPTLFDEALHRDLAGFRIQHPDLILLQYVDDLLLAATSENDCQQGTRALLQILGDLGYRASAKKAQICQKQVKYLGYLLKEGQRWLTEARKETVMGQPIPKTPRQLREFLGTAGFCRLWIPGFAEMAAPLYPLTKTGTLFNWGPDQQKAYQEIKQALLTAPALGLPDLTKPFELFVDEKQGYAKGVLTQRLGPWRRPVAYLSKKLDPVAAGWPPCLRMVAAIAVLTKDAGKLTLGQPLVVLAPHAVEALVKQPPDRWLSNARMTHYQALLLDTDRVQFGPVVALNPATLLPLPEEGLRHDCLDILAEAHGTRPDLTDQPLPDADHTWYTDGSSFLQKGQRKAGAAVTTETEVIWAKALPSGTSAQRAELIALTQALKMAEGKKLNVYTDSRYAFATAHIHGEIYRRRGLLTSEGKEIKNKGEILALLKALFLPKRLSIIHCPGHQKGNSAEARGNRMADQAAREIASKETPETSTLLIENSTP

SEQ ID NO: 8272 - protein, 677 aa, synthetic construct
TLNIEDEYRLHETSKEPDVSLGSTWLSDFPQAWAETGGMGLAVRQAPLIIPLKATSTPVSIKQYPMSQEARLGIKPHIQRLLDQGILVPCQSPWNTPLLPVKKPGTNDYRPVQDLREVNKRVEDIHPTVPNPYNLLSGLPPSHQWYTVLDLKDAFFCLRLHPTSQPLFAFEWRDPEMGISGQLTWTRLPQGFKNSPTLFDEALHRDLAGFRIQHPDLILLQYVDDLLLAATSELDCQQGTRALLQTLGDLGYRASAKKAQICQKQVKYLGYLLKEGQRWLTEARKETVMGQPIPKTPRQLREFLGTAGFCRLWIPGFAEMAAPLYPLTKTGTLFNWGPDQQKAFQEIKQALLTAPALGLPDLTKPFELFVDEKQGYAKGVLTQKLGPWRRPVAYLSKKLDPVAAGWPPCLRMVAAIAVLTKDAGKLTMGQPLVILAPHAVEALVKQPPDRWLSNARMTHYQALLLDTDRVQFGPVVALNPATLLPLPEEGLQHDCLDILAEAHGTRSDLMDQPLPDADHTWYTDGSSFLQEGQRKAGAAVTTETEVIWARALPAGTSAQRAELIALTQALKMAEGKKLNVYTDSRYAFATAHIHGEIYRRRGLLTSEGKEIKNKDEILALLKALFLPKRLSIIHCPGHQKGNSAEARGNRMADQAAREVATRETPETSTLLIENSTP

SEQ ID NO: 8273 - protein, 677 aa, synthetic construct
TLNIEDEYRLHETSKEPDVSLGSTWLSDFPQAWAETGGMGLAVRQAPLIIPLKATSTPVSIKQYPISQEARLGIKPHIQRLLDQGILVPCQSPWNTPLLPVKKPGTHDYRPVQDLREVNKRVEDIHPTVPNPYNLLSGLPPSHQWYTVLDLKDAFFCLRLHPTSQSLFAFEWRDPEMGISGQLTWTRLPQGFKNSPTLFDEALHRDLADFRIQHPDLILLQYVDDLLLAATSELDCQQGTRALLQTLGDLGYRASAKKAQICQKQVKYLGYLLKEGQRWLTEARKETVMGQPTPKTPRQLREFLGTAGFCRLWIPGFAEMAAPLYPLTKTGTLFNWGPDQQKAYQEIKQALLTAPALGLPDLTKPFELFVDEKQGYAKGVLTQKLGPWRRPVAYLSKKLDPVAAGWPPCLRMVAAIAVLTKDAGKLTMGQPLVILAPHAVEALVKQPPDRWLSNARMTHYQALLLDTDRVQFGPIVTLNPATLLPLPEEGLQHDCLDILAEAHGTRPDLTDQPLPDADHTWYTDGSSFLQEGQRKAGAAVTTETEVIWAKALPAGTSAQRAELIALTQALKMAEGKKLNVYTDSRYAFATAHIHGEIYRRRGLLTSEGKEIKNKDEILALLKALFLPKRLSIIHCPGHQKGNRAEARGNRMADQAAREVATRETPETSTLLIENSTP

SEQ ID NO: 8274 - protein, 677 aa, synthetic construct
TLNIEDEYRLHETSKGPDVPLGSTWLSDFPQAWAETGGMGLAVRQAPLIIPLRAASTPVSIKQYPMSREARLGIKPHIQRLLDQGILVPCQSPWNTPLLPVKKPGTNDYRPVQDLREVNKRVEDIHPTVPNPYNLLSGLPPSHQWYTVLDLKDAFFCLRLHPTSQSLFAFEWRDPEMGISGQLTWTRLPQGFKNSPTLFDEALHRDLADFRIQHPDLILLQYVDDLLLAATSELDCQQGTRALLQTLGDLGYRASAKKAQICQKQVKYLGYLLKEGQRWLTEARKETVMGQPTPKTPRQLREFLGTAGFCRLWIPGFAEMAAPLYPLTKTGTLFKWGPDQQKAYQEIKQALLTAPALGLPDLTKPFELFVDEKQGYAKGVLTQKLGPWRRPVAYLSKKLDPVAAGWPPCLRMVAAIAVLTKDAGKLTMGQPLVILAPHAVEALVKQPPDRWLSNARMTHYQALLLDTDRVQFGPIVTLNPATLLPLPEEGLQHDCLDILAEAHGTRPDLTDQPLPDADHTWYTDGSSFLQEGQRKAGAAVTTETEVIWAKALPAGTSAQRAELIALTQALKMAEGKKLNVYTDSRYAFATAHIHGEIYRRRGLLTSEGKEIKNKEEILALLKALFLPKRLSIIHCPGHQKGNRAEARGNRMADQAAREVATRETPETSTLLIENSAP

SEQ ID NO: 8275 - protein, 677 aa, synthetic construct
TLNIEDEYRLHETSKGPDVPLGSTWLSDFPQAWAETGGMGLAVRQAPLIIPLKATSTPVSIKQYPMSQEARLGIKPHIQRLLDQGILVPCQSPWNTPLLPVKKPGTNDYRPVQDLREVNKRVEDIHPTVPNPYNLLSGLPPSHQWYTVLDLKDAFFCLRLHPTSQSLFAFEWRDPEMGISGQLTWTRLPQGFKNSPTLFDEALHRDLADFRIQHPDLILLQYVDDLLLAATSELDCQQGTRALLQTLGDLGYRASAKKAQICQKQVKYLGYLLKEGQRWLTEARKETVMGQPTPKTPRQLREFLGTAGFCRLWIPGFAEMAAPLYPLTKTGTLFEWGPDQQKAYQEIKQALLTAPALGLPDLTKPFELFVDEKQGYAKGVLTQKLGPWRRPVAYLSKKLDPVAAGWPPCLRMVAAIAVLTKDAGKLTMGQPLVILAPHAVEALVKQPPDRWLSNARMTHYQALLLDTDRVQFGPIVALNPATLLPLPEEGLQHDCLDILAEAHGTRPDLTDQPLPDADHTWYTDGSSFLQEGQRKAGAAVTTETEVVWAKALPAGTSAQRAELIALTQALKMAEGKKLNVYTDSRYAFATAHIHGEIYRRRGLLTSEGKEIKNKDEILALLKALFLPKRLSIIHCPGHQKGNRAEARGNRMADQAAREVATRETPETSTLLIENSAP

SEQ ID NO: 8276 - protein, 677 aa, synthetic construct
TLNIEDEYRLHETSKGPDVPLGSTWLSDFPQAWAETGGMGLAFRQAPLIISLKATSTPVSIKQYPMSQEARLGIKPHIQRLLDQGILVPCQSPWNTPLLPVKKPGTNDYRPVQDLREVNKRVEDIHPTVPNPYNLLSGLPPSHQWYTVLDLKDAFFCLRLHPTSQSLFAFEWKDPEMGISGQLTWTRLPQGFKNSPTLFDEALHRDLADFRIQHPDLILLQYVDDLLLAATSELDCQQGTRALLQTLGDLGYRASAKKAQICQKQVKYLGYLLKEGQRWLTEARKETVMGQPTPKTPRQLREFLGTAGLCRLWIPGFAEMAAPLYPLTKTGTLFKWGPDQQKAYQEIKQALLTAPALGLPDLTKPFELFVDEKQGYAKGVLTQKLGPWRRPVAYLSKKLDPVAAGWPPCLRMVAAIAVLTKDVGKLTMGQPLVILAPHAVEALVKQPPDRWLSNARMTHYQALLLDTDRVQFGPIVALNPATLLPLPEEGLQHDCLDILAEAHGTRPDLTDQPLPDADHTWYTDGSSFLQEGQRRAGAAVTTETEVIWAKALPAGTSAQRAELIALTQALKMAAGKKLNVYTDSRYAFATAHIHGEIYRRRGLLTSEGKEIKNKDEILALLKALFLPKRLSIIHCPGHQKGNHAEARGNRMADQAAREVATRETPETSTLLIENSAP

SEQ ID NO: 8277 - protein, 677 aa, synthetic construct
TLNIEDEYRLHETSKEPDVPLGSTWLSDFPQAWAETGGMGLAVRQAPLIIPLKATSTPVSIKQYPMSQEARLGIKPHIQRLLDQGILVPCQSPWNTPLLPVKKPGTNDYRPVQDLREVNKRVEDIHPTVPNPYNLLSGLPPSHQWYTVLDLKDAFFCLRLHPTSQPLFAFEWRDPEMGISGQLTWTRLPQGFKNSPTLFDEALHRDLADFRIQHPDLILLQYVDDLLLAATSEQDCQRGTRALLQTLGNLGYRASAKKAQICQKQVKYLGYLLKEGQRWLTEARKETVMGQPTPKTPRQLREFLGTAGFCRLWIPGFAEMAAPLYPLTKTGTLFNWGPDQQKAYQEIKQALLTAPALGLPDLTKPFELFVDEKQGYAKGVLTQKLGPWRRPVAYLSKKLDPVAAGWPPCLRMVAAIAVLTKDAGKLTMGQPLVILAPHAVEALVKQPPDRWLSNARMTHYQAMLLDTDRVQFGPVVALNPATLLPLPEKEAPHDCLEILAETHGTRPDLTDQPIPDADYTWYTDGGSFLQEGQRRAGAAVTTETEVIWGGVLPAGTSAQRAELIALTQALKMAEGKKLNVYTDSRYAFATAHVHGEIYRRRGLLTSEGREIKNKNEILALLKALFLPKRLSIIHCPGHQKGNSAEARGNRMADQAAREAAMKAVLETSTLLIEDSTP

SEQ ID NO: 8278 - protein, 588 aa, synthetic construct
PHIQRLLDQGILVPCQSPWNTPLLPVKKPGTNDYRPVQDLREVNKRVEDIHPTVPNPYNLLSGLPPSHQWYTVLDLKDAFFCLRLHPTSQPLFAFEWRDPEMGISGQLTWTRLPQGFKNSPTLFDEALHRDLADFRIQHPDLILLQYVDDLLLAATSELDCQQGTRALLQTLGNLGYRASAKKAQICQKQVKYLGYLLKEGQRWLTEARKETVMGQPTPKTPRQLREFLGTAGFCRLWIPGFAEMAAPLYPLTKTGTLFNWGPDQQKAYQEIKQALLTAPALGLPDLTKPFELFVDEKQGYAKGVLTQKLGPWRRPVAYLSKKLDPVAAGWPPCLRMVAAIAVLTKDAGKLTMGQPLVILAPHAVEALVKQPPDRWLSNARMTHYQALLLDTDRVQFGPVVALNPATLLPLPEEGLQHNCLDILAEAHGTRPDLTDQPLPDADHTWYTDGSSLLQEGQRKAGAAVTTETEVIWAKALPAGTSAQRAELIALTQALKMAEGKKLNVYTDSRYAFATAHIHGEIYRRRGLLTSEGKEIKNKDEILALLKALFLPKRLSIIHCPGHQKGHSAEARGNRMADQAARKAAITE

SEQ ID NO: 8279 - protein, 676 aa, synthetic construct
TLNLEDEYRLYETSAEPEASPGSTWLSDFPQAWAETGGMGLAVRRRPLIIPLNATSTPVSIKQYPMSQEARLGIKPHIQRLLDQGILVPCQSPWNTPCLPVKKPGTNDYRPVQDLREVNKRVEDIHPTVPNPYNLLSGLPPSHRWYTVLDLKDAFFCLRLHPTSQPLFAFEWRDPGMGISGQLTWTRLPQGFKNSPTLFDEALHRDLADFRIQHPDLILLQYVDDILLAATSELDCQQGTRALLLTLGNLGYRASAKKAQLCQKQVKYLGYLLREGQRCLTEARKETVRGQPTPKTPRQLREFLGTAGFCRLWIPGFAEMAAPLYPLTKTGTLFNWGPDQQKAYQEIKQALLTAPALGLPDLTKPFELFVDEKQGYAKGSLTQKLGPWRRPVAYLSKKLDPVAAGWPPCLRMVAAIAVLRKDAGKLTMGQPLVILAPHADEALVKQPPDRWLSNARMTHYQAMLLDTDRVQFGPVVALNPSTFIPLPEEGAPHDCLEILAETHGTRPDLTDQPIPDADHTWYTDGSSFLQEGQRKAGAAVTTETEVIWARALPAGTSAQRELIALTQALKMAEGKRLNVYTDSRYAFATAHIHGEIYRRRGLLTSEGREIKNKSEILALLKALFLPKRLSIIHCLGHQKGDSAEARGNRLADQAAREAAINTPPDTSTLLIEDSTP

SEQ ID NO: 8280 - protein, 677 aa, synthetic construct
TLNIEDEYRLHEISTEPDVSPGSTWLSDFPQAWAETGGMGLAVRQAPLIIPLKATSTPVSIKQYPMSQEAKLGIKPHIQRLLDQGILVPCQSPWNTPLLPVKKPGTNDYRPVQGLREVNKRVEDIHPTVPNPYNLLSGLPTSHRWYTVLDLKDAFFCLRLHPTSQPLFASEWRDPGMGISGQLTWTRLPQGFKNSPTLFDEALHRGLADFRIQHPDLILLQYVDDLLLAATSELDCQQGTRALLKTLGNLGYRASAKKAQICQKQVKYLGYLLREGQRWLTEARKETVMGQPTPKTPRQLREFLGTAGFCRLWIPRFAEMAAPLYPLTKTGTLFNWGPDQQKAYHEIKQALLTAPALGLPDLTKPFELFVDEKQGYAKGVLTQKLGPWRRPVAYLSKKLDPVAAGWPPCLRMVAAIAVLTKDAGKLTMGQPLVILAPHAVEALVKQPPDRWLSNARMTHYQAMLLDTDRVQFGPVVALNPATLLPLPEEGAPHDCLEILAETHGTEPDLTDQPIPDADHTWYTDGSSFLQEGQRKAGAAVTTETEVIWARALPAGTSAQRAELIALTQALKMAEGKRLNVYTDSRYAFATAHIHGEIYKRRGLLTSEGREIKNKSEILALLKALFLPKRLSIIHCLGHQKGDSAEARGNRLADQAAREAAIKTPPDTSTLLIEDSTP

SEQ ID NO: 8281 - protein, 677 aa, synthetic construct
TLGIEDEYRLHETSTEPDVSLGSTWLSDFPQAWAETGGMGLAVRQAPLIIPLKATSTPVSIQQYPMSHEARLGIKPHIQRLLDQGILVPCQSPWNTPLLPVKKPGTNDYRPVQDLREVNKRVEDIHPTVPNPYNLLSGLPPSHQWYTVLDLKDAFFCLRLHPTSQPLFAFEWRDPGMGISGQLTWTRLPQGFKNSPTLFDEALHRDLADFRIQHPDLILLQYVDDILLAATSELDCQQGTRALLQTLGDLGYRASAKKAQICQKQVKYLGYLLREGQRWLTEARKETVMGQPVPKTPRQLREFLGTAGFCRLWIPGFAEMAAPLYPLTKTGTLFSWGPDQQKAYQEIKQALLTAPALGLPDLTKPFELFVDEKQGYAKGVLTQKLGPWRRPVAYLSKKLDPVAAGWPPCLRMVAAIAVLTKDAGKLTMGQPLVILAPHAVEALVKQPPDRWLSNARMTHYQAMLLDTDRVQFGPVVALNPATLLPLPEEGAPHDCLEILAETHGTRPDLTDQPIPDADHTWYTDGSSFLQEGQRKAGAAVTTETEVIWAGALPAGTSAQRAELIALTQALKMAEGKRLNVYTDSRYAFATAHIHGEIYRRRGLLTSEGREIKNKSEILALLKALFLPKRLSIIHCLGHQKGDSAEARGNRLADQAAREAAIKTPPDTSTLLIEDSTP

SEQ ID NO: 8282 - protein, 677 aa, synthetic construct
TLNLEDEYRLYETSAEPEASPGSTWLSDFPQAWAETGGMGLAVRQAPLIIPLKATSTPVSIKQYPMSQEARLGIKPHIQRLLDQGILVPCQSPWNTPLLPVKKPGTNDYRPVQDLREVNKRVEDIHPTVPNPYNLLSGLPPSHRWYTVLDLKDAFFCLRLHPTSQPLFAFEWRDPGMGISGQLTWTRLPQGFKNSPTLFDEALHRDLAGFRIQHPDLILLQYVDDLLLAATSELDCQQGTRALLQTLGDLGYRASAKKAQICQKQVKYLGYLLKEGQRWLTEARKETVMGQPIPKTPRQLREFLGTAGFCRLWIPGFAEMAAPLYPLTKTGTLFNWGPDQQKAYQEIKQALLTAPALGLPDLTKPFELFVDEKQGYAKGVLTQKLGPWRRSVAYLSKKLDPVAAGWPPCLRMVAAIAVLTKDAGKLTMGQPLVILAPHAEEALVKQPPDRWLSNARMTHYQAMLLDTDRVQFGPVVALNPATLLPLPEEGAPHDCLEILAETHGTRPDLTDQPIPDADHTWYSDGSSFLQEGQRKAGAAVTTETEVIWARALPAGTSAQRAELIALTQALKMAEGKRLNVYTDSRYAFATAHIHGEIYRRRGLLTSEGREIKNKSEILALLKALFLPKRLSIIHCLGHQKGDSAEARGNRLADQAAREAAIKTPPDTSTLLIEDSTP

SEQ ID NO: 8283 - protein, 677 aa, synthetic construct
TLNLEDEYRLYETSAEPEVSPGSTWLSDFPQAWAETGGMGLAVRQAPLIIPLKATSTPVSIKQYPMSQEAKLGIKPHIQRLLDQGILVPCQSPWNTPLLPVKKPGTNDYRPVQDLREVNKRVEDIHPTVPNPYNLLSGLPPSHRWYTVLDLKDAFFCLRLHPTSQPLFAFEWRDPGMGISGQLTWTRLPQGFKNSPTLFDEALHRDLADFRIQHPDLILLQYVDDILLAATSELDCQQGTRALLLTLGNLGYRASAKKAQLCQKQVKYLGYLLKEGQRWLTEARKETVMGQPTPKTPRQLREFLGTAGFCRLWIPGFAEMAAPLYPLTKTGTLFNWGPDQQKAYQEIKQALLTAPALGLPDLTKPFELFVDEKQGYAKGVLTQKLGPWRRPVAYLSKKLDPVAAGWPPCLRMVAAIAVLRKDAGKLTMGQPLVILAPHAVEALVKQPPDRWLSNARMTHYQAMLLDTDRVQFGPVVALNPATLLPLPEEGAPHDCLEILAETHGTRPDLTDQPIPDADHTWYTDGSSFLQEGQRKAGAAVTTETEVIWARALPAGTSAQRAELIALTQALKMAEGKRLNVYTDSRYAFATAHIHGEIYRRRGLLTSEGREIKNKSEILALLKALFLPKRLSIIHCLGHQKGDSAEARGNRLADQAAREAAIKTPPDTSTLLIEDSTP

SEQ ID NO: 8284 - protein, 678 aa, synthetic construct
TLQLEDEYRLYEPEQDKPKSPEIDSWVTKFPLAWAETGGMGLALQQPPLIIQLKATATPVSIKQYPMSWEAYQGIKPHIRRLLDQGILVPCRSPWNTPLLPVKKPGTGDYRPVQDLREVNKRVEDIHPTVPNPYNLLSTLQTTHTWYTVLDLKDAFFCLRLSPESQPLFAFEWKDSEMGLSGQLTWTRLPQGFKNSPTLFDEALHRDLADFRVQHPTLILLQFVDDLLLGATSETACHQGTESLLQTLGRLGYRASARKAQICQTQVTYLGYQLRDGQRWLTPARKQTVANIPAPRNGRQLREFLGTAGFCRLWIPGFAEMAAPLYPLTKQGVLFQWGAEQQEAFDNIKRALLSSPALGLPDITKPFELFVDEKQGYAKGVLTQRLGPWKRPVAYLSKKLDPVASGWPPCLRMVAAIAVLTKDAGKLTLGQPLTILAPHAVEALIKQPPDCWLSNSRMTHYQALLLDAERVQFGPVVALNPATLLPLPEEAEQHDCLQILAEVHGTRPDLSDRPLQDADHTWYTDGSSYLVNGERKAGAAVTTEDKVIWASALPVGTSAQRAELIALTQALKMAEGKRLNVYTDSRYAFATAHIHGEIYRRRGLLTSEGKDIKNKTEILALLAALFLPKRLSIIHCPGHQKGHSPEARGNRLADVSAREAAMGTQVLSLKDQDQPTSP

SEQ ID NO: 8285 - protein, 678 aa, synthetic construct
TLQLEDEYRLYEPEQDKPKSLEIDSWATKFPLAWAETGGMGLALQQPSLIIQLKSTATPSSIKQYPMSWEAYQGIKPHIRRLLDQGILVPCRSPWNMPLLPVKKPGTGDYRPVQDLREVNKRVEDIHPTVPNPYNLLSTLPPTHTWYTVLDLKDAIFCLRLSPESQPLFAFEWKDSEMGLSGQLTWTRLPQGFKNSPMLFDEALHRDLADFRVQHPTLILLQFVDDLLLGATSETACHQGTESLLQTLGRLGYRASARKAQICQTQVTYLGYQLRDGQRWLTPARKQTVANIPAPRNGRQLREFLGTAGFCRLWIPGFAEMAAPLYPLTKQGVLFQWGAEQQEAFDNIKRALLSSSALGLPEITKPFELFVDEKQGYAKGVLTQRLGPWNHPVAYLSKKLDPVASGWPPCLRMVAAIAVLTKDAGKLTLGQPLTILAPHAVEALIKQPPGRWLSNSRMTHYQALLLDAEWVQFGPVVALNPATLLPLTEEAEQHDCLQILAEVHGIRPDLSDRPLQDADHTWYTDGSSYLVNGERKAGAAVTTEDKVIWASALPVGTSAQRAELIALTQALKMAEGKRLNVYTDRHYAFATAHIHGEIYQRRGLLTSEGKDIKNKTEIQALLAALFLPKRLRIIHCPGHQKGHSPEARGNRLADVSAPEAAMGTQVLFLKDQDQPTSP

SEQ ID NO: 8286 - protein, 678 aa, synthetic construct
PLQLEDEYRLYEPEQAKPKSLEIDSWVTKFPLAWAETGGMGLALQQPPLIIQLKATATPVSIKQYPMSWEAYQGIKPHIRRLLDQGILVPCWSPWNTPLLPVKKPGTGDYRPVQDLREVNKRVEDIHPAVPNPYNLLSTLPPTHTWYMVLDLKDAFFCLRLSPESQPLFAFEWKDSEMGLSGQLTWTRLPQGFKNSPTLFDEALHRDLADFRVQHPTLILLQFVDDLLLGATSETACHQGTESLLQTLGRLGYRASARKAQICQTQVTYLGYQLRDGQRWLTPARKQTVANIPAPRNGRQLREFLGTAGFCRLWIPGFAEMAAPLYPLTKQGVLFQWGAEQQEAFDNIKRALLSSPALGLPDITKPFELFVDEKQGCAKGVLTQRLGPWKCPVVYLSKKLDPVASGCSPCLRMVAAIAVLTKDAGKLTLGQPLTILAPHAVEALIKQPPDRWLSNSRMTHYQALLLDAEWVQFGPVVALNPATLLPLTEEAEQHDCLQILAEVHGIRPDLSDRPLQDADHTWYTDGSSYLVNGERKAGAAVTTEDKVIWASALPVGTSAQRAELIALTQALKMAEGKRLNVYTDRHYAFATAHIHGEIYQRRGLLTSEGKDIKNKTEIQALLAALFLPKRLRIIHCPGHQKGHSPEARGNRLADVSAPEAAMGTQVLFLKDQDQPTSP

SEQ ID NO: 8287 - protein, 676 aa, synthetic construct
TLQLEEEYRLFEPESTQKQEMDIWLKNFPQAWAETGGMGTAHCQAPVLIQLKATATPISIRQYPMPHEAYQGIKPHIRRMLDQGILKPCQSPWNTPLLPVKKPGTEDYRPVQDLREVNKRVEDIHPTVPNPYNLLSTLPPSHPWYTVLDLKDAFFCLRLHSESQLLFAFEWRDPEIGLSGQLTWTRLPQGFKNSPTLFDEALHSDLADFRVRYPALVLLQYVDDLLLAAATRTECLEGTKALLETLGNKGYRASAKKAQICLQEVTYLGYSLKDGQRWLTKARKEAILSIPVPKNSRQVREFLGTAGYCRLWIPGFAELAAPLYPLTRPGTLFQWGTEQQLAFEDIKKALLSSPALGLPDITKPFELFIDENSGFAKGVLVQKLGPWKRPVAYLSKKLDTVASGWPPCLRMVAAIAILVKDAGKLTLGQPLTILTSHPVEALVRQPPNKWLSNARMTHYQAMLLDAERVHFGPTVSLNPATLLPLPSGGNHHDCLQILAETHGTRPDLTDQPLPDADLTWYTDGSSFIRNGEREAGAAVTTESEVIWAAPLPPGTSAQRAELIALTQALKMAEGKKLTVYTDSRYAFATTHVHGEIYRRRGLLTSEGKEIKNKNEILALLEALFLPKRLSIIHCPGHQKGDSPQAKGNRLADDTAKKAATETHSSLTVLPTELIEG

SEQ ID NO: 8288 - protein, 675 aa, synthetic construct
TVSLQDEHRLFDIPVTTSLPDVWLQDFPQAWAETGGLGRAKCQAPIIIDLKPTAVPVSIKQYPMSLEAHMGIRQHIIKFLELGVLRPCRSPWNTPLLPVKKPGTQDYRPVQDLREINKRTVDIHPTVPNPYNLLSTLKPDYSWYTVLDLKDAFFCLPLAPQSQELFAFEWKDPERGISGQLTWTRLPQGFKNSPTLFDEALHRDLTDFRTQHPEVTLLQYVDDLLLAAPTKKACTQGTRHLLQELGEKGYRASAKKAQICQTKVTYLGYILSEGKRWLTPGRIETVARIPPPRNPREVREFLGTAGFCRLWIPGFAELAAPLYALTKESTPFTWQTEHQLAFEALKKALLSAPALGLPDTSKPFTLFLDERQGIAKGVLTQKLGPWKRPVAYLSKKLDPVAAGWPPCLRIMAATAMLVKDSAKLTLGQPLTVITPHTLEAIVRQPPDRWITNARLTHYQALLLDTDRVQFGPPVTLNPATLLPVPENQPSPHDCRQVLAETHGTREDLKDQELPDADHTWYTDGSSYLDSGTRRAGAAVVDGHNTIWAQSLPPGTSAQKAELIALTKALELSKGKKANIYTDSRYAFATAHTHGSIYERRGLLTSEGKEIKNKAEIIALLKALFLPQEVAIIHCPGHQKGQDPVAVGNRQADRVARQAAMAEVLTLATEPDNTSH

SEQ ID NO: 8289 - protein, 652 aa, synthetic construct
LQDFPQAWAETGGLGRAKCQVPIIIDLKPTAMPVSIRQYPMSKEAHMGIQPHITRFLELGVLRPCRSPWNTPLLPVKKPGTRDYRPVQDLREVNKRTMDIHPTVPNPYNLLSTLSPDRTWYTVLDLKDAFFCLPLAPQSQELFAFEWRDPERGISGQLTWTRLPQGFKNSPTLFDEALHRDLTDFRTQHPEVTLLQYVDDLLLAAPTKEACIRGTKHLLRELGDKGYRASAKKAQICQTKVTYLGYILSEGKRWLTPGRIETVAHIPPPQNPREVREFLGTAGFCRLWIPGFAELAAPLYALTKESAPFTWQEKHQSAFEALKEALLSAPALGLPDTSKPFTLFIDEKQGIAKGVLTQKLGPWKRPVAYLSKKLDPVAAGWPPCLRIMAATAMLVKDSAKLTLGQPLTVITPHALEAIVRQTPDRWITNARLTHYQALLLDTDRIQFGPPVTLNPATLLPAPEDQQSAHDCRQVLAETHGTREDLKDQELPDADHSWYTDGSSYIDSGTRRAGAAVVDGHHIIWAQSLPPGTSAQKAELIALTKALELSEGKKANIYTDSRYAFATAHTHGSIYERRGLLTSEGKEIKNKAEIIALLKALFLPRKVAIIHCPGHQKGQDPIATGNRQADQVARQVAVAETLTLTTKLEETNL

SEQ ID NO: 8290 - protein, 672 aa, synthetic construct
TLQLDDEYRLFSPPVKLDQNIQFGSTQFPQALAEPAGMGLAKQVPPQVIQLKPSLAPVPVRQSPFSKEAREGIRPHVQRLIQQGIIVPVQSPWNTPLLPVRKPGTNDYRPVQDFERGQKRVQDIHPTVPNPYNLLCALPPQRSWYTVLDLKDAFFCLRLHPTSQPLFAFEWRDPGAGRTGQLTWTRLPQGFKNFPTIFDQALHRDLANFRIQHPQVTLLQYVDDLVLAAATKQDCLQRPKGLLVELSDLGDRAFGYKAHICPTEVTYLGYRLRGRHRWLTEAPQTTVVQIPGPTPAKQVREFLGTVGFCRLWIPGFATLPAPLYPLPKEKGEFSWALQHQKAFDAIKKALLSAPALALPDVTKTLYVDERKGVARGVLTQTLGPWRRPVAYLSKKLDPVASGWPICLKAIAAVAILVKDADKLTLGQNITVIAPHALENIVRQPPDRWMTNARMTHYQSLLLTERVTFAPPAALNPATLLPEETDEPLTHDCHQLLIEETGVRKDLTDIPLTGEPVTWFTDGSSYLVEGNKMAGAAVVDRTPTIWGTNLPERTSSQKGELIGLMQAFRLGQGKSINIYTDSRYAFATAHVHGAIYTQRGLLTSAGREIKNKEEILSLLEALHLPKRLAIIHCPGHQKAKDPISRGNQMADRVAKQAAQGVNLLPMIETPKAP

SEQ ID NO: 8291 - protein, 676 aa, synthetic construct
TLQLDEYRLYSPLVKPDQNIQFWLEQFPKAWAETAGMGLAKQVPPQVIQLKASAAPVSVRQYLLSKEAREGIGPHVQRLIQQGILVPVQSPWNTPLLPVRKPGTNDYRPVQDLREVNKRVQDIHPTVPNPYNLLCALPPQRSWYTVLDLKDAFFCLRLHPTSQPLFAFEWRDPGAGRTGQLTWTRLPQGFKNSPTIFDEALHRDLANFRIQHPQVTLLQYVDDLLLAGATKQDCLEGLLLELFDLGYRASAKKAQICRREATQLGVQVCGAGQSDWLTGKARKKTVQPKIGPPTTAKQVVREFFGAQVGFCRLWIPGFATLAAPLYPLTKEKGEFSWALEHQKAFDAIKKALSSAPALALPDVLKPFTLYVDERKGVARGVLTQILGPWRRPVAYLSKKLDPVASGWPICLKAIAAVAILVKDADKLTLGQNITVIAPHALENIVRQPPDRWMTNARMTHYQSLLLTERVTFAPPAALNPATLLPEETDEPVTHDCHLLIEETGVRKDLTDIPPLTGKMLTWFTDGSSYVVEGKSMAGPPVVTGTRTIWASSLPEGTSAQKAELMALTQALRLAEGKSINIYTDSRYAFATAHVHGAIYKQRGLLTSAGREIKTKEEILSLLEALHLPKRLAIIHCPGHQKAKDPISRGNQMADRVAKQAAQGVNLLPMIETPKAP

SEQ ID NO: 8292 - protein, 674 aa, synthetic construct
TLQLDDEYRLYSPLVKPDQNIQSWLEQFPQAWAETAGMGLAKQVPPQVIQLKASATPISVRQYPLSREAREEIWPHVQRLIQQGILVPVRSPWNTPLLPVRKPGTNDYRPVQDLREVNKRVQDIHPMVPNPYNLLSALPPKRNWYTVLDLKNAFFCLRLHPTSQPLFAFEWRDPGTGRTGQLTWTRLPQGFKNSPTIFDEALHRDLANFRIQHPQVTLLQYVDDLLLAGATKQDCLEGTNALLLELSDLGYRASAKKAQICRREVTYLGYSLRDGQRWLTEARKRTVVQILAPTTAKQVREFLGTAGFCRLWIPGFATLAAPLYPLTKEKGEFSWAPEHQKAFDAIKKALLSAPALALPDVTKPFTLYVDEHKGVARGVLTQSLGPWRRPVAYLSKKLDPVASGWPVCLKAIAAVAILVKDADKSTLGQNITVIAPHALENIVRQPPDRWMTNARMTHYQSLLLTERITFAPPAALNPATLLPEETDEPVTHDCHQLLIEETGVRKDLTDIPLTGEVLTWFTDGSSYVVEGKRMARAAVVDGTRTIWASSLSEGTSAQKAELVALTQALRLAEGKSINIYTDSRYAFATAHVHGAIYKQRGLLTSAGREVKNKEKILSLLEALHLPKRLAIIHCPGHQKAKDLISRGNQMADRVAKQAAQGVNLLPIIETPKAP

SEQ ID NO: 8293 - protein, 674 aa, synthetic construct
TLQLDDEYRLYSPLVKPDQNIQFWLEQFPQAWAETAGMGLAKQVPPQVIQLKASATPVSVRQYPLSKEAQEGIRPHVQRLIQQGILVPVQSPWNTPLLPVRKPGTNDYRPVQDLREVNKRVQDIHPTVPNPYNLLCALPPQRSWYTVLDLKDAFFCLRLHPTSQPLFAFEWRDPGTGRTGQLTWTRLPQGFKNSPTIFDEALHRDLANFRIQHPQVTLLQYVDDLLLAGATKQDCLEGTKALLLELSDLGYRASAKKAQICRREVTYLGYSLRDGQRWLTEARKKTVVQIPAPTTAKQMREFLGTAGFCRLWIPGFATLAAPLYPLTKEKGEFSWAPEHQKAFDAIKKALLSAPALALPDVTKPFTLYVDERKGVARGVLTQTLGPWRRPVAYLSKKLDPVASGWPICLKAIAAVAILVKDADKLTLGQNITVIAPHALENIVRQPPDRWMTNARMTHYQSLLLTERVTFAPPAALNPATLLPEETDEPVTHDCHQLLIEETGVRKDLTDIPLTGEVLTWFTDGSSYVVEGKRMAGAAVVDGTRTIWASSLPEGTSAQKAELMALTQALRLAEGKSINIYTDSRYAFATAHVHGAIYKQRGLLTSAGREIKNKEEILSLLEAVHLPKRLAIIHCPGHQKAKDLISRGNQMADRVAKQAAQGVNLLPIIEMPKAP

SEQ ID NO: 8294 - protein, 674 aa, synthetic construct
TLQLDDEYRLYSPLVKPDQNIQFWLEQFPQAWAETAGMGLAKQVPPQVIQLKASATPVSVRQYPLSKEAQEGIRPHVQRLIQQGILVPVQSPWNTPLLPVRKPGTNDYRPVQDLREVNKRVQDIHPTVPNPYNLLCALPPQRSWYTVLDLKDAFFCLRLHPTSQPLFAFEWRDPGTGRTGQLTWTRLPQGFKNSPTIFDEALHRDLANFRIQHPQVTLLQYVDDLLLAGATKQDCLEGTKALLLELSDLGYRASAKKAQICRREVTYLGYSLRDGQRWLTEARKKTVVQIPAPTTAKQVREFLGTAGFCRLWIPGFATLAAPLYPLTKEKGEFSWAPEHQKAFDAIKKALLSAPALALPDVTKPFTLYVDERKGVARGVLTQTLGPWRRPVAYLSKKLDPVASGWPVCLKAIAAVAILVKDADKLTLGQNITVIAPHALENIVRQPPDRWMTNARMTHYQSLLLTERVTFAPPAALNPATLLPEETDEPVTHDCHQLLIEETGVRKDLTDIPLTGEVLTWFTDGSSYVVEGKRMAGAAVVDGTRTIWASSLPEGTSAQKAELMALTQALRLAEGKSINIYTDSRYAFATAHVHGAIYKQRGLLTSAGREIKNKEEILSLLEALHLPKRLAIIHCPGHQKAKDPISRGNQMADRVAKQAAQGVNLLPMIETPKAP

SEQ ID NO: 8295 - protein, 674 aa, synthetic construct
TLQLDDEYRLYSPLVKPDQNIQFWLEQFPQAWAETAGMGLAKQVPPQVIQLKASAAPVSVRQYPLSKEAREGIRPHVQRLIQQGILVPVQSPWNTPLLPVRKPGTNDYRPVQDLREVNKRVQDIHPTVPNPYNLLCALPPQRSWYTVLDLKDAFFCLRLHPTSQPLFAFEWRDPGAGRTGQLTWTRLPQGFKNSPTIFDEALHRDLANFRIQHPQVTLLQYVDDLLLAGATKQDCLEGTKALLLELSDLGYRASAKKAQICRREVTYLGYSLRGGQRWLTEARKRTVVQIPAPTTAKQVREFLGTAGFCRLWIPGFATLAAPLYPLTKEKGEFSWAPEHQKAFDAIKKALLSAPALALPDVTKPFTLYVDERKGVARGVLTQTLGPWRRPVAYLSKKLDPVASGWPICLKAIAAVAILVKDADKLTLGQNITVIAPHALENIVRQPPDRWMTNARMTHYQSLLLTERVTFAPPAALNPATLLPEETDEPVTHDCHQLLIEETGVRKDLTDIPLTGEMLTWFTDGSSYMVEGKRMAGAAVVDGTRTIWASSLPEGTSAQKAELMALTQALRLAEGKSINIYTDSRYAFATAHVHGAIYKQRGLLTSAGREIKNKEEILSLLEALHLPKRLAIIHCPGHQKAKDPISRGNQMADRVAKQAAQGVNLLPMIETPKAP

SEQ ID NO: 8296 - protein, 674 aa, synthetic construct
TLQLDDEYRLYSSLVKPDQNIQFWLEQFPQAWAETAGMGLAKQVPPQVIQLKASAAPVSVRQYPLSKEAREGIRPHVQRLIQQGILVPVQSPWNTPLLPVRKPGTNDYRPVQDLREVNKRVQDIHPTVPNPYNLLCALPPQRSWYTVLDLKDAFFCLRLHPTSQPLFAFEWRDPGAGRTGQLTWTRLPQGFKNSPTIFDEALHRDLANFRIQHPQVTLLQYVDDLLLAGATKQDCLEGTKALLLELSDLGYRASAKKAQICRREVTYLGYSLRGGQRWLTEARKRTVVQIPAPTTAKQVREFLGTAGFCRLWIPGFATLAAPLYPLTKEKGEFSWAPEHQKAFDAIKKALLSAPALALPDVTKPFTLYVDERKGVARGVLTQTLGPWRRPVAYLSKKLDPVASGWPVCLKAIAAVAILVKDADKLTLGQNITVIAPHALENIVRQPPDRWMTNARMTHYQSLLLTERVTFAPPAALNPATLLPEETDEPVTHDCHQLLIEETGVRKDLTDIPLTGEVLTWFTDGSSYVVKGKRMAGPPVVDGTRTIWASSLPEGTSAQKAELMALTQALRLAEGKSINIYTDSRYAFATAHVHGAIYKQRGLLTSAGREIKNKEEILSLLEALHLPKRLAIIHCPGHQKAKDPISRGNQMADRVAKQAAQGVNLLPMIETPKAP

SEQ ID NO: 8297 - protein, 674 aa, synthetic construct
TPQLDDEYRLYSPQVKPDQDIQSWLEQFPQAWAETAGMGLAKQVPPQVIQLKASATPVSVRQYPLSREAREGIWPHVQRLIQQGILVPVQSPWNTPLLPVRKPGTNDYRPVQDLREVNKRVQDIHPTVPNPYNLLSALPPERNWYTVLDLKDAFFCLRLHPTSQPLFAFEWRDPGTGRTGQLTWTRLPQGFKNSPTIFDEALHRDLANFRIQHPQVTLLQYVDDLLLAGATKQDCSEGTKALLLELSDLGYRASAKKAQICRREVTYLGYSLRDGQRWLTEARKKTVVQIPAPTTAKQVREFLGTAGFCRLWIPGFATLAAPLYPLTKEKGEFSWAPEHQKAFDAIKKALLSAPALALPDVTKPFTLYVDERKGVARGVLTQTLGPWRRPVAYLSKKLDPIASGWPVCLKAIAAVAILVKDADKLTLGQNITIIAPHALENIVRQPPDRWMTNARMTQYQSLLLTERITFAPPAALNPATLLPEETDEPVTHDCHQLLIEETGVRKDLIDIPLTGEVLTWFTDGSSYVVEGKRMAGAAVVDGTRTIWASSLPEGTSAQKAELMALTQALRLADGKSINIYTDSRYAFATAHVHGAIYKQRGLLTSAGREIKNKEEILSLLEALHLPKRLAIIHCPGHQKAKDPISRGNQMADRVAKQAAQGVNLLPIIETPKAP

SEQ ID NO: 8298 - protein, 674 aa, synthetic construct
TLQLDDEYRLYSPQVKPDQDIQSWLEQFPQAWAETAGMGLAKQVPPQVIQLKASATPVSVRQYPLSREAREGIWPHVQRLIQQGILVPVQSPWNTPLLPVRKPGTNDYRPVQDLREVNKRVQDIHPTVPNPYNLLSALPPERNWYTVLDLKDAFFCLRLHPTSQPLFAFEWRDPGTGRTGQLTWTRLPQGFKNSPTIFDEALHRDLANFRIQHPQVTLLQYVDDLLLAGATKQDCLEGTKALLLELSDLGYRASAKKAQICRREVTYLGYSLRGGQRWLTEARKKTVVQIPAPTTAKQVREFLGTAGFCRLWIPGFATLAAPLYPLTKEKGEFSWAPEHQKAFDAIKKALLSAPALALPDVTKPFTLYVDERKGVARGVLTQTLGPWRRPVAYLSKKLDPVASGWPICLKAIAAVAILVKDADKLTLGQNITVIAPHALENIVRQPPDRWMTNARMTHYQSLLLTERVTFAPPAALNPATLLPEETDEPVTHDCHQLLIEETGVRKDLTDIPLTGEVLTWFTDGSSYVVEGKRMAGAAVVDGTRTIXASSLPEGTSAQKAELMALTQALRLAEGKSINIYTDSRYAFATAHVHGAIYKQRGLLTSAGREIKNKDEILSLLEALHLPKRLAIIHCPGHQKAKDLISRGNQMADRIAKQAAQAVNLLPIIETPKAP

SEQ ID NO: 8299 - protein, 674 aa, synthetic construct
TLQLDDEYRLYSPQVKPDQDIQSWLEQFPQAWAETAGMGLAKQVPPQVIQLKASATPVSVRQYPLSREAREGIWPHVQRLIQQGILVPVQSPWNTPLLPVRKPGTNDYRPVQDLREVNKRVQDIHPTVPNPYNLLSALPPERNWYTVLDLKDAFFCLRLHPTSQPLFAFEWRDPGTGRTGQLTWTRLPQGFKNSPNIFDEALHRDLANFRIQHPQVTLLQYVDDLLLAGATKQDCLEGTKALLLELSDLGYRASAKKAQICRREVTYLGYSLRGGQRWLTEARKKTVVQIPAPTTAKQVREFLGTAGFCRLWIPGFATLAAPLYPLTKEKGEFSWAPEHQKAFDAIKKALLSAPALALPDVTKPFTLYVDERKGVARGVLTQTLGPWRRPVAYLSKKLDPVASGWPVCLKAIAAVAILVKDADKLTLGQNITVIAPHALENIVRQPPDRWMTNARMTHYQSLLLTERVTFAPPAALNPATLLPEETDEPVTHDCHQLLIEETGVRKDLTDIPLTGEVLTWFTDGSSYVVEGKRMAGAAVVDGTHTIWASSLPEGTSAQKAELMALTQALRLAEGKSINIYTDSRYAFATAHVHGAIYKQRGLLTSAGREIKNKEEILSLLEALHLPKRLAIIHCPGHQKAKDLISRGNQMADRVAKQAAQAVNLLPIIETPKAP

SEQ ID NO: 8300 - protein, 672 aa, synthetic construct
VLSTEEEYRLHEEQPKGAAPLDWVTAFPNVWAEQAGMGLAKQVPPVVVELKADATPISVRQYPMSKEAKEGIRPHIRRLLDQGILVACQSPWNTPLLPVRKPGTNDYRPVQDLREVNKRVLDIHPTVPNPYNLLSSLPPERTWYTVLDLKDAFFCLRLHPKSQLLFAFEWRDPEGGQTGQLTWTRLPQGFKNSPTLFDEALHRDLAPFRAQNPQLTLLQYVDDLLIAAASKELCQQGTERLLTELGNLGYRVSAKKAQICQTEVIYLGYTLRGGKRWLTEARKKTVMMIPPPTTPRQVREFLGTAGFCRLWIPGFATLAAPLYPLTREGIPFEWKEEHQRAFEAIKSSLMTAPALALPDLTKSFVLYVDERAGIARGVLTQALGPWKRPVAYLSKKLDPVASGWPTCLKAIAAVALLIKDADKLTMGQQVTVVAPHALESIVRQPPDRWMTNARMTHYQSLLLNDRVTFAPPAILNPATLLPLTNDSVPVHRCADILAEEIGTRKDLTDQPWPGAPSWYTDGSSFLIEGKRRAGAAVVDGKKVIWASALPEGTSAQKAELIALTQALREAEGKIINIYTDSRYAFATAHIHGAIYRQRGLLTSAGKDIKNKEEILALLEAIHAPKKVAIIHCPGHQKGEDLVAKGNRMADSVAKQVAQGAMILTEKGNPSKS

SEQ ID NO: 8301 - protein, 673 aa, synthetic construct
VLNLEEEYRLHEKPVPPSIDPSWLQLFPMVWAEKAGMGLANQVPPVVVELKSDASPVAVRQYPMSKEAREGIRPHIQRFLDLGILVPCQSPWNTPLLPVKKPGTNDYRPVQDLREVNKRVQDIHPTVPNPYNLLSSLPPSHTWYSVLDLKDAFFCLKLHPNSQPLFAFEWRDPEKGNTGQLTWTRLPQGFKNSPTLFDEALHRDLASFRALNPQVVMLQYVDDLLVAAPTYRDCKEGTRRLLQELSKLGYRVSAKKAQLCREEVTYLGYLLKGGKRWLTPARKATVMKIPTPTTPRQVREFLGTAGFCRLWIPGFASLAAPLYPLTREKVPFTWTEAHQEAFGRIKEALLSAPALALPDLTKPFALYVDEKEGVARGVLTQTLGPWRRPVAYLSKKLDPVASGWPTCLKAIAAVALLLKDADKLTLGQNVLVIAPHNLESIVRQPPDRWMTNARMTHYQSLLLNERVSFAPPAILNPATLLPVESDDTPIHICSEILAEETGTRPDLRDQPLPGVPAWYTDGSSFIMDGRRQAGAAIVDNKRTVWASNLPEGTSAQKAELIALTQALRLAEGKSINIYTDSRYAFATAHVHGAIYKQRGLLTSAGKDIKNKEEILALLEAIHLPKRVAIIHCPGHQRGTDPVATGNRKADEAAKQAAQSTRILTETTKNQEHF

SEQ ID NO: 8302 - protein, 672 aa, synthetic construct
VLNLEEEYRLHEKPVPSFVDPSWLQLFPTVWAERTGMGLANQVPPVVVELKSGASPVAVRQYPMSKEAREGIRPHIQKFLDLGVLVPCQSPWNTPLLPVKKPGTNDYRPVQDLREINKRVQDIHPTVPNPYNLLSSLPPSHIWYSVLDLKDAFFCLRLHPNSQPLFAFEWRDPEKGNTGQLTWTRLPQGFKNSPTLFDEALHRDLAPFRALNPQVVLLQYVDDLLVAAPTYEDCKEGTQKLLQELSKLGYRVSAKKAQLCQKEVTYLGYLLKEGKRWLTPARKATVMKIPAPTTPRQVREFLGTAGFCRLWIPGFASLAAPLYPLTKESFPFVWTEEHQKAFDHIKEALLSAPALALPDLTKPFTLYVDERAGMARGVLTQTLGPWRRPVAYLSKKLDPVASGWPTCLKAVAAVALLLKDADKLTLGQKVTVIASHSLESIVRQPPDRWMTNARMTHYQSLLLNERVSFAPPAVLNPATLLPVESEATPVHRCSEILAEETGTRRDLKDQPLPGVSAWYTDGSSFIVEGKRRAGAAIVDGKRTVWASSLPEGTSAQKAELVALTQALRLAKGRNINIYTDSRYAFATAHIHGAIYKQRGLLTSAGKDIKNKEEILALLEAIHLPKQVAIIHCPGHQRGNNPVATGNRRADEAAKQAALSTRVLAEITKLQEP

SEQ ID NO: 8303 - protein, 672 aa, synthetic construct
VLNLEEEYRLHEKPVPSFVDPSWLQLFPTVWAERAGMGLANQVPPVVVELKSGASPVAVRQYPMSKEAREGIRPHIQKFLDLGVLVPCQSPWNTPLLPVKKPGTNDYRPVQDLREINKRVQDIHPTVPNPYNLLSSLPPSHIWYSVLDLKDAFFCLRLHPNSQPLFAFEWRDPEKGNTGQLTWTRLPQGFKNSPTLFDEALHRDLAPFRVLNPQVVLLQYVDDLLVAAPTYEDCKEGTQKLLQELSKLGYRVSAKKAQLCQKEVTYLGYLLKEGKRWLTPARKATVMKIPAPTTPRQVREFLGTAGFCRLWIPGFASLAAPLYPLTKESFPFVWTEEHQKAFDHIKEALLSAPALALPDLTKPFTLYVDERAGMARGVLTQTLGPWRRPVAYLSKKLDPVASGWPTCLKAVAAVALLLKDADKLTLGQKVTVIASHSLESIVRQPPDRWMTNARMTHYQSLLLNERVSFAPPAVLNPATLLPVESEATPVHRCSEILAEETGTRRDLKDQPLPGVSAWYTDGSSFIAEGKRRAGAAIVDGKRTVWASSLPEGTSAQKAELVALTQALRLAKGRNINIYTDSRYAFATAHIHGAIYKQRGLLTSAGKDIKNKEEILALLEAIHLPKQVAIIHCPGHQRGSNPVATGNRRADEAAKQAALSTRVLAETTKPQEP

SEQ ID NO: 8304 - protein, 673 aa, synthetic construct
VLNLEEEYRLHEKPVPSSIDPSWLQLFPTVWAERAGMGLANQVPPVVVELRSGASPVAVRQYPMSKEAREGIRPHIQKFLDLGVLVPCRSPWNTPLLPVKKPGTNDYRPVQDLREINKRVQDIHPTVPNPYNLLSSLPPSYTWYSVLDLKDAFFCLRLHPNSQPLFAFEWKDPEKGNTGQLTWTRLPQGFKNSPTLFDEALHRDLAPFRALNPQVVLLQYVDDLLVAAPTYEDCKKGTQKLLQELSKLGYRVSAKKAQLCQREVTYLGYLLKEGKRWLTPARKATVMKIPVPTTPRQVREFLGTAGFCRLWIPGFASLAAPLYPLTKESIPFIWTEEHQQAFDHIKKALLSAPALALPDLTKPFTLYIDERAGVARGVLTQTLGPWRRPVAYLSKKLDPVASGWPTCLKAVAAVALLLKDADKLTLGQNVTVIASHSLESIVRQPPDRWMTNARMTHYQSLLLNERVSFAPPAVLNPATLLPVESEATPVHRCSEILAEETGTRRDLEDQPLPGVPTWYTDGSSFITEGKRRAGAPIVDGKRTVWASSLPEGTSAQKAELVALTQALRLAEGKNINIYTDSRYAFATAHIHGAIYKQRGLLTSAGKDIKNKEEILALLEAIHLPRRVAIIHCPGHQRGSNPVATGNRRADEAAKQAALSTRVLAGTTKPQEPI

SEQ ID NO: 8305 - protein, 672 aa, synthetic construct
VLSLEEEYRLHEKPVPTSIDPSWLQLFPTVWAERAGMGLANRVPPVVVELKSGASPVAVRQYPMSKEAREGIRPHIQRFLDLGVLVPCRSPWNTPLLPVKKPGTNDYRPVQDLREINKRVQDIHPTVPNPYNLLSSLPPSHTWYSVLDLKDAFFCLKLHPNSQSLFAFEWKDPEKGNTGQLTWTRLPQGFKNSPTLFDEALHRDLALFRAHNPQVKLLQYVDDLLVAAPTYQDCKEGTQKLLQELSKLGYRVSAKKAQLCQKEVTYLGYLLKEGKRWLTPARKATVMKIPAPTTPRQVREFLGTAGFCRLWIPGFASMAAPLYPLTKESIPFIWTEEHQKAFDLIKKALLSAPALALPDLTKPFTLYVDERAGVARGVLTQTLGPWRRPVAYLSKKLDPVASGWPTCLKAVAAVALLLKDADKLTLGQNVTVIASHSLESIVRQPPDRWMTNARMTHYQSLLLNERVSFAPPAVLNPATLLPVESEATPVHRCSEILAEETGTRQDLKDQPLPGVPTWYTDGSSFIAEGKRKAGAAIVDGKRTVWASSLPEGTSAQKAELVALTQALRLAEGRNINIYTDSRYAFATAHIHGAIYKQRGLLTSAGKDIKNKEEILALLEAIHLPKRVAIIHCPGHQKGNDPVATGNRRADEAAKQAALSTRVLAETTKPQEP

SEQ ID NO: 8306 - protein, 672 aa, synthetic construct
VLGLEEEYRLHEKPVPSSVDPSWLQLFPDVWAEKGGMGLANRVPPIVVELKSDALPVAVRQYPMSREAREGIRPHIQRFLDLGVLVPCQSPWNTPLLPVKKPGTSDYRPVQDLREINKRVQDIHPTVPNPYNLLSSLPPNHTWYSVLDLKDAFFCLKLHPNSQLLFAFEWRDPEKGHTGQLTWTRLPQGFKNSPTLFDEALHRDLASFRASNPQVVLLQYVDDLLVAAPTYKDCKEGTQKLLQELSELGYRVSAKKAQLCQREVTYLGYLLKEGKRWLTPARKATVMEIPTPTTPRQVREFLGTAGFCRLWIPGFASLAAPLYPLTKESTPFLWTEEHRRAFDQIKEALLTAPALALPDLTKPFALYVDERAGVARGVLTQTLGPWRRPVAYLSKKLDPVASGWPTCLKAVAAVALLLKDADKLTLGQSVTVIASHSLESIVRQPPDRWMTNARMTHYQSLLLNERVSFAPPAVLNPATLLPAESGAAPVHECSEILAEETGTRQDLTDQPLPGVPAWYTDGSSFITEGKRRAGAAIVDGKRTVWMSSLPEGTSAQKAELIALTQALRLADGKDINIYTDSRYAFATAHIHGAIYRQRGLLTSAGKEIKNKEEILALLEAIHLPKRVAIIHCPGHQKGNDPVAIGNRRADEAAKQAALAVRVLAETIEPQGQ

SEQ ID NO: 8307 - protein, 672 aa, synthetic construct
VLNLEEEYRLHEKPAPPSIDPFWLQLFPNVWAEQGGMGLANQVPPVVVELKSDASPVAVRQYPMSKEAREGIRPHIQRFLDLGVLVPCQSPWNTPLLPVKKPGTNDYRPVQDLREINKRVQDIHPTVPNPYNLLSSLPPSHTWYSVLDLKDAFFCLKLHPNSQLLFAFEWRDPEKGHTGQLTWTRLPQGFKNSPTLFDEALHRDLASFRASNPQVILLQYVDDLLVAAPTYEDCKEGTQKLLQELSELGYRVSAKKAQLCQKEVTYLGYLLKEGKRWLTPARKATVMRIPTPITPRQVREFLGTAGFCRLWIPGFASLAAPLYPLTKESVPFLWTEEHQRAFDHIKEALLTAPALALPDLTKPFALYVDEKAGVARGVLTQTLGPWRRPVAYLSKKLDPVASGWPTCLKAVAAVALLLKDADKLTLGQNVTVIASHSLESIVRQPPDRWMTNARMTHYQSLLLNERVSFAPPAVLNPATLLPAESEAALVHDCSEILAEETGTRQDLTDQPLPGVPAWYTDGSSFIAEGKRRAGAAIVDNKRTVWMSSLPEGTSAQKAELIALTQALRLADGKDINIYTDSRYAFATAHIHGAIYRQRGLLTSAGKEIKNKEEILALLEAIHLPRRVAIVHCPGHQKGNDPIALGNRRADEAAKQAALSVRVLAETTGPQGP

SEQ ID NO: 8308 - protein, 672 aa, synthetic construct
VLNLEEEYRLHEKPVPSSIDPLWLQLFPNVWAEKGGMGLASQVPPVVVELKSDASPVAVRQYPMSREAQEGIRPHIQRFLDLGVLVPCQSPWNTPLLPVKKPGTNDYRPVQDLREVNKRVQDIHPTVPNPYNLLSSLPPSHTWYTVLDLKDAFFCLKLHPNSQPLFAFEWRDPEKGHTGQLTWTRLPQGFKNSPTLFDEALHRDLASFRASNPQVVLLQYVDDLLVAAPTYEDCKEGTQKLLQELSNLGYRVSAKKAQLCQKEVTYLGYLLKEGQRWLTPARKATVMGIPTPTTPRQVREFLGTAGFCRLWIPGFASLAAPLYPLTKESTPFLWTEEHQKAFDCIKEALLTAPALALPDLTKPFALYVDERDGVARGVLTQTLGPWRRPVAYLSKKLDPVASGWPTCLKAVAAVALLLKDADKLTLGQNVTVIASHSLESIVRQPPDRWMTNARMTHYQSLLLNERVSFAPPAVLNPATLLPAESEAAPVHTCSEILAEETGTRKDLTDQPLPGVPAWYTDGSSFITEGKRRAGAAIVDSKRTVWMSSLPEGTSAQKAELIALTQALRLANGRDINIYTDSRYAFATAHIHGAIYRQRGLLTSAGKEIKNREEILALLEAIHLPRRVAIIHCPGHQKGNDPVAVGNRRADEAAKQAALSVQVLAEITKPQEL

SEQ ID NO: 8309 - protein, 678 aa, synthetic construct
TLPLAEEYLLYEGPHDTGDRWLEKWKDELPGVWAETNPPGLAKDRPPIHVQLMSTAQPIRVRQYPMTLEARRGVRENIRKLRAAGILVPCHSPWNTPLLPVRKAETGQYRMVQDLREVNKRVETIHPTVPNPYTLLSLLPPDHIWYSVLDLKDAFFCLPLAPGSQPLFAFEWSDPEEGESGQLTWTRLPQGFKNSPTLFDEALSHDLQSYRTGHPEVTLLQYMDDLIVAARSEAECAQATRDLLETLGDQGYRVSAKKAQLCSQQVTYLGFRLKGGTRTLTESRIKAIVQIPSPKTKRQVREFLGTVGYCRLWIPGFAELAKPLHAVAGGGARPLTWTKTEEEAFQALKSALLQAPALSLPDLEKPFQLFVAENKGVAKGVLTQRIGPWKRPVAYLSRKLDPVAAGWPGCLRAIAAAALLVKEASKLTFGQNLEVTSAHNLESLLRSPPDRWMTNTRVTQYQVLLLDPPRVSFRQTAALNPATLLPEADESLPFHQCEDTLDALTTLRPDLTDRPLLDAEVTLFTDGSSFVDQGXRHAGAAIVTLDSTIWAEALPKGTSAQRAELIALTKALLWGEDKRVNIYTDSRYAFATLHVHGALYKERGLLTTGGKEIKNAPEILALLSSVWKPKKVAVIHCRGHQKNDTNIARGNQRADRVAKEVARGEIAPVLTLQEPNPV

SEQ ID NO: 8310 - protein, 678 aa, synthetic construct
SSPLVEEYRLFVEQPAQNLALLDLWREDIPEVWAESNPPGLATTQVPVHVQLTSTALPIRIRQYPISLEARRSLRGSIRKFKAAGILKPVHSPWNTPLLPVRKTGTSEYRMVQDLREVNKRVETIHPTVPNPYTLLSLLPPDRTWYSVLDLKDAFFCIPLTCQSQLLFAFEWIDIEEGESGQLTWTRLPQGFKNSPTLFDEALSRDLQGYRFDHPTVTLLQYVDDLLIAARSRDECLQATRDLLVTLGSMGYRVSGSKAQLCQEEVTYLGFRIKDGTRTLAQSRVQAILQIPAPKTKKQVREFLGTVGYCRLWIPSFAELAQPLYAATRGADAPLRWTGTEEEAFQRLKTALLQPPALALPNLDKPFQLFVDEAKGVAKGVLMQTLGPWKRPVAYLSRKLDPLAAGWPRCLRAIAAAALLSKEASKLTFEQSLEITSSHNLEGLLRTPPDKWLTNARVTQYQVLLLDPPRVIFKQTAALNPATLLPATDDSLPLHHCADTLDALTTTRPDLTDQPLADAEATLFTDGSSYVKKAEYAGAAVVTTNSIVWAEALPRGTSAQRAELIALTKALEWSRDKTVNIYTDSRYAFATLHVHAMIYKERGLLTAGGKAIKNASEILALLTAIWLPKRVAVIHCRGHQQGESLEALGNRLADKTAREVAKKSPAIQASLCDPPRTP

SEQ ID NO: 8311 - protein, 679 aa, synthetic construct
TAPLEEEYRLFLEAPIQNVTLLEQWKREIPKVWAEINPPGLASTQAPIHVQLLSTALPVRVRQYPITLEARRSLRETIRKFRAAGILRPVHSPWNTPLLPVRKPGTSEYRMVQDLREVNKRVETIHPTVPNPYTLLSLLPPDRTWYSVLDLKDAFFCIPLAPESQLIFAFEWTDAEEGESGQLTWTRLPQGFKNSPTLFDEALNRDLQGFRLDHPSVSLLQYVDDLLIAADTQAACLSATRDLLMTLAELGYRVSGKKAQLCQEEVTYLGFKIHKGSRTLSNSRTQAILQIPVPKTKRQVREFLGTIGYCRLWIPGFAELAQPLYAATRGGNDPLEWGEKEEEAFQSLKLALTQPPALALPSLDKPFQLFIEETGGAAKGVLTQTLGPWKRPVAYLSKRLDPVAAGWPRCLRAIAAAALLTREASKLTFGQDIEITSSHNLESLLRSPPDRWLTNARITQYQVLLLDPPRVRFKQTAALNPATLLPETDDTLPIHHCLDTLDSLTSTRPDLTDQPLAQAEATLFTDGSSYIRDGKRYAGAAVVTLDSVVWAEPLPIGTSAQKAELIALTKALEWSKDKSVNIYTDSRYAFATLHVHGMIYKERGLLTAGGKAIXNAPEILALLTAVWLPKRVAVMHCRGHQKDDAPTSAGNRRADEVAREVAIRPLSVQATVSDAPDMP

SEQ ID NO: 8312 - protein, 679 aa, synthetic construct
TAPLEEEYRLFLEAPIQNVTLLEQWKREIPKVWAEINPPGLASTQAPIHVQLLSTALPVRVRQYPITLEARRSLRETIRKFRAAGILRPVHSPWNTPLLPVRKPGTSEYRMVQDLREVNKRVETIHPTVPNPYTLLSLLPPDRTWYSVLDLKDAFFCIPLAPKSQLIFAFEWTDAEEGESGQLTWTRLPQGFKNSPTLFDEALNRDLQGFRLEHPSVSLLQYVDDLLIAADTQAACLSATRDLLMTLAELGYRVSGKKAQLCQEEVTYLGFKIHKGSRTLSNSRTQAILQIPVPKTKRQVREFLGTIGYCRLWIPGFAELAQPLYAATRGGNDPLEWGEKEEEAFQSLKLALTQPPALALPSLDKPFQLFIEETGGAAKGVLTQALGPWKRPVAYLSKRLDPVAAGWPRCLRAIAAAALLTREASKLTFGQDIEITSSHNLESLLRSPPDRWLTNARITQYQVLLLDPPRVRFKQTAALNPATLLPETDDTLPIHHCLDTLDSLTSTRPDLTDQPLAQAEATLFTDGSSYIRDGKRYAGAAVVTLDSVIWAEPLPIGTSAQKAELIALTKALEWSKDKSVNIYTDSRYAFATLHVHGMIYKERGLLTAGGKAIKNAPEILALLTAVWLPKRVAVMHCRGHQKDDAPTSAGNRRADEVAREVAIRPLSIQATVSDAPDMP

SEQ ID NO: 8313 - protein, 679 aa, synthetic construct
TAPLEEEYRLFLEAPIQNVTLLEQWKREIPKVWAEINPPGLASTQAPIHVQLLSTALPVRVRQYPITLEARRSLRETIRKFRAAGILRPVHSPWNTPLLPVRKPGTSEYRMVQDLREVNKRVETIHPTVPNPYTLLSLLPPDRTWYSVLDLKDAFFCIPLAPKSPLIFAFEWTDAEEGESGQLTWTRLPQGFKNSPTLFDEALNRDLQGFRLDHPSVSLLQYVDDLLIAADTQAACLSATRDLLMTLAELGYRVSGKKAQLCQEEVTYLGFKIHKGSRTLSNSRIQAILQIPVPKTKRQVREFLGTIGYCRLWIPGFAELAQPLYAATRGGNDPLEWGEKEEEAFQSLKLALTQPPALALPSLDKPFQLFIEETGGAAKGVLTQALGPWKRPVAYLSKRLDPVAAGWPRCLRAIAAAALLTREASKLTFGQDIEITSSHNLESLLRSPPDRWLTNARITQYQVLLLDPPRVRFKQTAALNPATLLPETDDTLPIHHCLDTLDSLTSTRPDLTDQPLAQAEATLFTDGSSYIPHGKRYAGAAVVTLDSVIWAEPLPIGTSAQKAELIALTKALEWSKDKSVNIYTDSRYAFATLHVHGMIYKERGLLTAEGKAIKNAPEILALLTAVWLPKRVAVMHCRGHQKDDAPTSAGNRRADEVAREVAIRPLSIQATVFDAPDMP

SEQ ID NO: 8314 - protein, 679 aa, synthetic construct
TAPLEEEYRLFLEAPIQNVTLLEQWKREIPKVWAEINPPGLASTQAPIHVQLLSTALPVRVRQYPITLEAKRSLRETIRKFRAAGILRPVHSPWNTPLLPVRKSGTSEYRMVQDLREVNKRVETIHPTVPNPYTLLSLLPPDRIWYSVLDLKDAFFCIPLAPESQLIFAFEWADAEEGESGQLTWTRLPQGFKNSPTLFDEALNRDLQGFRLDHPSVSLLQYVDDLLIAADTQAACLSATRDLLMTLAELGYRVSGKKAQLCQEEVTYLGFKIHKGSRSLSNSRTQAILQIPVPKTKRQVREFLGTIGYCRLWIPGFAELAQPLYAATRGGNDPLVWGEKEEEAFQSLKLALTQPPALALPSLDKPFQLFVEETSGAAKGVLTQALGPWKRPVAYLSKRLDPVAAGWPRCLRAIAAAALLTREASKLTFGQDIEITSSHNLESLLRSPPDKWLTNARITQYQVLLLDPPRVRFKQTAALNPATLLPETDDTLPIHHCLDTLDSLTSTRPDLTDQPLAQAEATLFTDGSSYIRDGKRYAGAAVVTLDSVIWAEPLPIGTSAQKAELIALTKALEWSKDKSVNIYTDSRYAFATLHVHGMIYRERGLLTAGGKAIKNAPEILALLTAVWLPKRVAVMHCKGHQKDDAPTSTGNRRADEVAREVAIRPLSTQATISDAPDMP

SEQ ID NO: 8315 - protein, 679 aa, synthetic construct
TAPLEEEYRLFLEAPIQNVTLLEQWKREIPKVWAEINPPGLASTQAPIHVQLLSTALPVRVRQYPITLEAKRSLRETIRKFRAAGILRPVHSPWNTPLLPVRKSGTSEYRMVQDLREVNKRVETIHPTVPNPYTLLSLLPPDRIWYSVLDLKDAFFCIPLAPESQLIFAFEWADAEEGESGQLTWTRLPQGFKNSPTLFDEALNRDLQGFRLDHPFVSLLQYVDDLLIAADTQAACLSATRDLLMTLAELGYRVSGKKAQLCQEEVTYLGFKIHKGSRTLSNSRTQAILQIPVPKTKRQVREFLGTIGYCRLWIPGFAELAQPLYAATRGGNDPLVWGEKEEGAFQSLKLALTQPPALALPSLDKPFQLFVEETGGAAKGVLTQALGPWKRPVAYLSKRLDPVAAGWPRCLRAIAAAALLTREASKLTFGQDIEITSSHNLESLLRSPPDRWLTNARITQYQVLLLDPPRVRFKQTAALNPATLLPETDDTLPIHHCLDTLDSLTSTRPDLTDQPLAQAEATLFTDGSSYIRDGKRYTGAAVVTLDSVIWAEPLPIGTSAQKAELIALTKALEWSKDKSVNIYTDSRYAFATLHVHGMIYRERGLLTAGGKAIKNAPEILALLTAVWLPKRVAVMHCKGHQKDDAPTSTGNRRADEVAREVAIRPLSTQATISDAPDMP

SEQ ID NO: 8316 - protein, 679 aa, synthetic construct
TAPLEEEYRLFLEAPIQNVTLLEQWKREIPKVWAEINPPGLASTQAPIHVQLLSTALPVRVRQYPITLEAKRSLRETIRKFRAAGILRPVHSPWNTPLLPVRKSGTSEYRMVQDLREVNKRVETIHPTVPNPYTLLSLLPPDRIWYSVLDLKDAFFCIPLAPESQLIFAFEWADAEEGESGQLTWTRLPQGFKNSPTLFDEALNRDLQGFRLDHPFVSLLQYVDDLLIAADTQAACLSATRDLLMTLAELGYRVSGKKAQLCQEEVTYLGFKIHKGSRTLSNSRTQAILQIPVPKTKRQVREFLGTIGYCRLWIPGFAELAQPLYAATRGGNDPLVWGEKEEESFQSLKLALTQPPALALPSLDKPFQLFVEETGGAARGVLTQALGPWKRPVAYLSKRLDPVAAGWPRCLRAIAAAALLTREASKLTFGQDIEITSSHNLESLLRSPPDRWLTNARITQYQVLLLDPPRVRFKQTAALNPATLLPETDDTLPIHHCLDTLDSLTSTRPDLTDQPLAQAEATLFTDGSSYIRDGKRYTGAAVVTLDSVIWAGPLPIGTSAQKAELIALTKALEWSKDKSVNIYTDSRYAFATLHVHGMIYRERGLLTAGGKAIKNAPEILALLTAVWLPKRVAVMHCKGHQKGDAPTSTGNRRADEVAREVAIRPLSTQATISDAPDMP

SEQ ID NO: 8317 - protein, 679 aa, synthetic construct
TAPLEEEYRLFLEAPIQNVTLLEQWKREIPKVWAEIIPPGLASTQAPIHVQLLSTALPVRVRQYPITLEAKRSLRETIRKFRAAGILRPVHSPWNTPLLPVRKSGTSEYRMVQDLREVNKRVETIHPTVPNPYTLLSLLPPDRIWYSVLDLKDAFFCIPLAPESQLIFAFEWADAEEGESGQLTWTRLPQGFKNSPTLFDEALNRDLQGFRLDHPFVSLLQYVDDLLIAADTQAACLSATRDLLMTLAELGYRVSGKKAQLCQEEVTYLGFKIHKGSRTLSNSRTQAILQIPVPKTKRQVREFLGTIGYCRLWIPGFAELAQPLYAATRGGNDPLVWGEKEEEALQSLKLALTQPPALALPSLDKPFQLFVEETGGAAKGVLTQALGPWKRPVAYLSKRLDPVAAGWPRCLRAIAAAALLTREASKLTFGQDIEITSSHNLESLLRSPPDRWLTNARITQYQVLLLDPPRVRFKQTAALNPATLLPETDDTLPIHHCLDTLDSLTSTRHDLTDQPLAQAEATLFTDGSSYIRDGKRYTGAAVVTLGSVIWAEPLPIGTSAQKAELIALTKALEWSKDKSVNIYTDSRYAFATLHVHGMIYRERGLLTAGGKAIKNAPEILALLTAVWLPKRVAVMHCKGHQKDDAPTSTGNRRADEVAREVAIRPLSTQATISDAPDMP

SEQ ID NO: 8318 - protein, 766 aa, synthetic construct
TTLVPLQDYQERLLKQTAFPEQHRKRLQTLFLKYDALWQHWENQVGHRRIKPHHIATGTVAPRPQKQYPINPKAKPSIQIVINDLLKQGVLIQQNSTMNTPVYPVPKPDGKWRMVLDYREVNKTIPLIAAQNQHSAGILSSIYRGKYKTTLDLSNGFWAHSITPESYWLTAFTWQGKQYCWTRLPQGFLNSPALFTADVVDLLKEIPNVQAYVDDIYISHDDPEEHLEQLEKVFSILLNAGYVVSLKKSEIAQYEVEFLGFNITKEGRGLTETFKQKLLNITPPKDLKQLQSILGLLNFARNFIINFSELVKPLYSIISNAQGKYITWTEENSNQLQHIIDVLNMAENLEERNPETRLIVKVNASPSAGYIRFYNEHSKRPIMYINYVFTKAEIKFTPTEKLLTTIHKALIKALDIAMGQEILVYSPITSMTKIQKTPLPERKALPIRWITWMTYLEDPRIFFHYDKTLPELQQIPAVTEDVVYKTKHPSEFQRVFYTDGSAIKHPDITKSHSAGMGIAETQFSPEFKVLNKWSIPLGDHTAQLAEIAAEEFACKKALKITGPVLIVTDSFYVAESANKELPYWQSNGFLNNKKKPLKHVSKWKSIAECLQLKPDITIIHEKGHQPTATSFHTEGNSLADKLATQGSYVVNTNTTPSLDAELDQLLQGQYPKGYPKHYSYKLQEGHVVVERPNGIRIIPPKADRSTIILQAHNIAHTGRDSTFLKVTSKYWWPNLRKDVVKVIRQCKQCLVTNQAVLTAPPILRPE

SEQ ID NO: 8319 - protein, 766 aa, synthetic construct
TVLVPLQDYQERLLKQTTLPKEQKDQLEKLFLKYDALWQHWENQVGHRRIKPHNIATGTLAPRPQKQYPINPKAKPSIQIVIDDLLKQGVLIQQNSTMNTPVYPVPKPDGKWRMVLDYREVNKTIPLIAAQNQHSAGILSSIYRGKYKTTLDLTNGFWAHPITPESYWLTAFTWQGKQYCWTRLPQGFLNSPALFTADVVDLLKEVPNVQAYVDDIYMSHDDPQEHLEQLEKVFSILLNAGYVVSLKKSEIAQREVEFLGFNITKEGRGLTETFKQKLLNVIPPKDLKQLQSILGLLNFARNFIPNYSELVKPLYTIVANANGKFISWTEENSNQLQYIISVLNQADNLEERNPETRLILKVNSSPSAGYIRYYNEGSKRPIMYVNYVFSKAEVKFTQTEKMLTTMHKGLIKAMDLAMGQEILVYSPIVSMTKIQKTPLPERKALPVRWITWMTYLEDPRIQFHYDKTLPELQQTPSVTEDVIAKTKHPSEFAMVFYTDGSAIKHPDINKSHSAGMGIAQVQFQPEYKVIHQWSIPLGDHTAQLAEIAAVEFACKKALKISGPVLIVTDSFYVAESANKELSYWKSNGFLNNKKKPLKHVSKWKSIAECLQLKPDITIIHEKGHQQPMTTLHTEGNNLADKLATQGSYVVHCNTTPSLDAELDQLLQGHNPPGYPKQYKYTLEDNKIIVERPNGQRIVPPKSDREKIISMAHNIAHTGRDATFLKVSSKYWWPNLRKDVVKVIRQCKQCLVTNAANLTSPPILRPE

SEQ ID NO: 8320 - protein, 768 aa, synthetic construct
TILVPLQDYQSRILEKTALSEEFKKQLQTLFLKYDNLWQHWENQVCHRKIRPHNIATGDYPPRPQKQYPINPKARSSIQVVIDDLLKQGVLVQQNSTMNTPVYPIPKPDGRWGMVLDYREVNKTIPLIAAQNQHSAGILATIVRKKYKTTLVLANGFWAHPITPESYWLTAFIWQGKQYCWTRLPQGFLNSPALFTADVVDLLKEISNVQAYVDDIYLSHDDPQEHLDQLEKVFQILLQAGYVVSLKKSEVAQKTVEFLGFNITKEGRGLTEAFKAKLLDITPPKDLKQLQSILGLLNFARNFILNFAELVKPLYSLISSAKGKYIEWSNENTVQLQTIIKALNNADNLEERIPEKRLIIKVNTSPSAGYVRYYNETGKKPIMYLNYVFSKAELKFTLLEKLLTTMHKALIKAMDLAMGQEILVYSPVVSMTKIQKTPIPERKALPIRWITWMTYLEDPRIQFHYDKTLPELKNIPDVLTENSSKIMIHPSQYNSVFYTDGSAIRSPDPTKSHNAGMGIVQVKFSPELQVINQWSIPLGNHTAQMAEIAAVEFACKKALKITGPVLIITDSFYVAESTNKELPYWKSNGFVNNKKKPLKHVSKWKSIAECLSLKPDITIQHERGHQPIYTSIHTEGNALADKLATQGSYVVNNNDKKPNLDAELDHLIQGKYPKGYPKQYTYYMEDGKVKVNRPEGTKIIPPSLERAGIVQKAHNLAHTGREATLLKIANLYWWPNMRKDVVRQLGRCQQCLVTNAFNQTSGPILRPT

SEQ ID NO: 8321 - protein, 767 aa, synthetic construct
TILVPLQEYQEKILSKTALPEDQKQQLKTLFVKYDNLWQHWENQVGHRKIRPHNIATGDYPPRPQKQYPINPKAKPSIQIVIDDLLKQGVLTPQNSTMNTPVYPVPKPDGRWRMVLDYREVNKTIPLTAAQNQHSAGILATIVRQKYKTTLDLANGFWAHPITPESYWLTAFTWQGKQYCWTRLPQGFLNSPALFTADVVDLLKEIPNVQVYVDDIYLSHDDPKEHVQQLEKVFQILLQAGYVVSLKKSEIGQKTVEFLGFNITKEGRGLTDTFKTKLLNITPPKDLKQLQSILGLLNFARNFIPNFAELVQPLYNLIASAKGKYIEWSEENTKQLNMVIEALNTASNLEERLPEQRLVIKVNTSPSAGYVRYYNETGKKPIMYLNYVFSKAELKFSMLEKLLTTMHKALIKAMDLAMGQEILVYSPIVSMTKIQKTPLPERKALPIRWITWMTYLEDPRIQFHYDKTLPELKHIPDVYTSSQSPVKHPSQYEGVFYTDGSAIKSPDPTKSNNAGMGIVHATYKPEYQVLNQWSIPLGNHTAQMAEIAAVEFACKKALKIPGPVLVITDSFYVAESANKELPYWKSNGFVNNKKKPLKHISKWKSIAECLSMKPDITIQHEKGHQPTNTSIHTEGNALADKLATQGSYVVNCNTKKPNLDAELDQLLQGHYIKGYPKQYTYFLEDGKVKVSRPEGVKIIPPQSDRQKIVLQAHNLAHTGREATLLKIANLYWWPNMRKDVVKQLGRCQQCLITNASNKASGPILRPD

SEQ ID NO: 8322 - protein, 767 aa, synthetic construct
TIKLPVQDLKNTLVSQANIGKEDKIKLAKLLDKYDDLWQQWDNQVGNRKITPHNIATGTYPPKPQKQYHINPKAKPSIQIVINDLLKQGVLRQSTSPMNTPVYPVPKPDGKWRMVLDYRAVNKTIPLIAAQNQHSLGILTNLIRHKYKSTIDLSNGFWAHPITEDSQWITAFTWEGKQHVWTRLPQGFLNSPALFTADVVDILKEVPGVSVYVDDIYISSPTMEEHFQVLDSIFRKLLETGYIVSLKKSALARYEVNFLGFVISETGRGLTSEFRERLQEITPPTTLKQLQSILGFLNFARNFVPNFSELVQPLYQLISTASGNFIQWTAEHTLRLNELISALNHAGNLEQRRGDSPLVVKVNASDKTGYIRYYNDNSLIPIAYASHVFSTAELKFTPLEKLLVTMHRALLKGIDLALGQPIKVYSPIASMQKLQKTPIPERKALSTRWVTWLSYLEDPRITFYYDKTLPDLKHVPASTDNNIITLLPITEYEAVFYTDGSAIKSPKTEQTHSAGMGIVMVVYTPEPNITQQWSIPLGDHTAQYAEISAVEFACKKASLLQGPVLIVTDSDYVARSANKELPFWRSNGFLNNKKKPLKHISKWKNISDSLLLKRNITIVHEPGHQPSKTSIHTLGNSLADKLAVQGSYSVNTINKIPSLDAELNQILEGNLPKGYPKQYKYVLKNNELIVQRPEGDKIIPPKADRLPLVKTAHELAHTGREATLLKLQTTHWWPNMRKDIITVLRQCKPCLQTDSTNLTPIPPVSQP

SEQ ID NO: 8323 - protein, 767 aa, synthetic construct
TEKLPIQDYKDNIVKRADITKEEKGMLYKLLDKYDPLWQQWENQVGNRQITPHIIATGTINPKPQKQYHINPKAKPSIQIVINDLLKQGVLKQQNSIMNTPIYPVPKTEGKWRMVLDYRAVNKTIPLIAAQNQHSAGILTNLVRQKYKSTIDLSNGFWAHPIDQDSQWITAFTWEGKQYVWTRLPQGFLNSPALFTADVVDLLKEIPNVNVYVDDIYVSTETINQHFQVLDKIFQKLLQAGYVVSLKKSNLCRYEVTFLGFTISKYGRGLTEEFQEKLRNISPPNSLKQLQSILGLLNFARNFIPNFSELIKPLYELISTAQGQSISWEPKHSQALNNLIIALNHADNLEQRNGEVPLVIKINASNTTGYIRFYNKNGKRPIAYASHVFNHTEQKFTPVEKLLTTMHKAIIKGIDLAIGQPIEIYSPIVSMQKLQKITLPERKALSTRWLSWLSYIEDPRFLFIYDKTLPDLKEMPPTQTDDYNPMLPLHQYLAVFYTDGSSIKSPDPTKTHSSGMGIVQAIYEPNFQIKHQWSIPLGDHTAQYAEIAAVEFACKKALQVTGPVLIVTDSDYVARSVNNELNFWRSNGFVNNKKKPLKHISKWKSISESLLLHKNITIVHEPGHQPSSTSVHTQGNALADKLAVQGSYTINNITIKPSLDTELRAVLEGKLPKGYPKNLKYEYNSPNLIVIRKEGQRIIPPLSDRPKLVKQAHELAHTGREATLLRLQNQYWWPKMRKDVSHCLRTCMPCLQTNSTNLTTTRPFQQI

SEQ ID NO: 8324 - protein, 772 aa, synthetic construct
TIKIDIQKQQEQLLHTTNLSSEGKKYLKDLFIKYDNLWQKWENQVGHRRITPHKIATGTLNPKPQKQYRINPKAKADIQIVIDDLLKQGVLKQQTSPMNTPVYPVPKPDGRWRMVLDYRAVNKVTPAIATQNCHSASLLNTLYRGQYKTTLDLANGFWAHPIQESDQWITSFTWNGKSYVWTTLPQGFLNSPALFTADVVDLLKDIPNVEVYVDDVYFSNDTEEEHLKTMDLLFQKLQTAGYIVSLKKSKLGQHTVDFLGFQITQTGRGLTDSYKSKLLDITPPNTLKQLQSILGLLNFARNFIPNYSELITPLYQLIPLAKGIYIPWETKHTAILQKIIKELNASENLEQRKPDVELIVKVHVSPTAGYIKFANKGSIKPIAYHNVVFSKTELKFTITEKVMTTIHKALLKAFDLAMGQPIWVYSPIHSMTRIQKTPLTERKALSIRWLKWQTYFEDPRLIFHYDDTLPDLQNLPQTTLGNEVDILPLSEYEVVFYTDGSSIKSPKKDKQHSAGMGIIAVRYQPQMNIIQEWSIPLGDHTAQFAEIAAFEFALKQAIRKMGPVLIVTDSDYVAKSYNQELDFWVSNGFVNNKKKPLKHVSKWKSIADCKKHKADIHVIHEPGHQNDLQSPYAMGNNAADKLAVKASYTVFSVQTLPSLDAELHQLLDKQTPNPKGYPSKYEYTLRDGQVYVKRTDGEKIIPSKDDRVKILELAHKGPGSGHLGKNTMYIKILNKYWWPNLIKDISKYIRTCTNCIITNTDNVPNKSYIVQE

SEQ ID NO: 8325 - protein, 776 aa, synthetic construct
TIKIDVESQKHTLITESTLSPQGQMRLKKLLDQYQALWQCWENQVGHRRIEPHKIATGALKPRPQKQYHINPRAKADIQIVIDDLLRQGVLRQQNSEMNTPVYPVPKADGRWRMVLDYREVNKVTPLVATQNCHSASILNTLYRGPYKSTLDLANGFWAHPIKPEDYWITAFTWGGKTYCWTVLPQGFLNSPALFTADVVDILKDIPNVQVYVDDVYVSSATEQEHLDILETIFNRLSTAGYIVSLKKSKLAKETVEFLGFSISQNGRGLTDSYKQKLMDLQPPTTLRQLQSILGLINFARNFLPNFAELVAPLYQLIPKAKGQCIPWTMDHTTQLKTIIQALNSTENLEERRPDVDLIMKVHISNTAGYIRFYNHGGQKPIAYNNALFTSTELKFTPTEKIMATIHKGLLKALDLSLGKEIHVYSAIASMTKLQKTPLSERKALSIRWLKWQTYFEDPRIKFHHDATLPDLQNLPVPQQDTGKEMTILPLLHYEAIFYTDGSAIRSPKPNKTHSAGMGIIQAKFEPDFRIVHLWSFPLGDHTAQYAEIAAFEFAIRRATGIRGPVLIVTDSNYVAKSYNEELPYWESNGFVNNKKKTLKHISKWKAIAECKNLKADIHVIHEPGHQPAEASPHAQGNALADKQAVSGSYKVFSNELKPSLDAELEQVLSTGRPNPQGYPNKYEYKLVNGLCYVDRRGEEGLKIIPPKADRVKLCQLAHDGPGSAHLGRSALLLKLQQKYWWPRMHIDASRIVLNCTVCAQTNSTNQKPRPPLVIP

SEQ ID NO: 8326 - protein, 771 aa, synthetic construct
TIKLNLEEQQRTLLNNSILSKKGKEELKRLFEKYNALWQSWENQVGHRKIRPHKIATGTVKPTPQKQYHINPKAKPDIQIVINDLLKQGVLIQKESTMNTPVYPVPKPNGHWRMVLNYRAVNKVTPLIAVQNQHSYGILGSLFKGKYKTTIDLSNGFWAHPIVPEDYWITAFTWQGKQYCWTVLPQGFLNSPGLFTGDVVDLLQGIPNVEVYVDDVYISHDSEKEHLEYLEILFNRLNEAGYIVSLKKSNIANSSVDFLGFQITNEGQGLTDTFKEKLENITAPTTLKQLQSILGLLNFARNFIPDFTELIAPLYALIPKSTKNYVPWQIEHSTTLETLIAKLNEAKYLQGRRGDKTLIMKVNASYTTGYIRYYNEGEKKPISYVSIVFSKTELKFTKLEKLLTTVHKGLLKALDLSMGQNIHVYSPIVSMQNIQKTPQTAKKALASRWLSWLSYLEDPRIRFFYDPQMPALKDLPAVNIGENNKKHPSNFQHIFYTDGSAITSPTKEGHLNAGMGIVYFINRDGNLQKQQEWSISLGNHTAQFAKIAAFEFALKKCLPLGGNILVVTDSNYVAKAYNEELDVWASNGFVNNRKKPLKHISKWKSVANFKKLRPNVVVTHEPGHQKLNSSPHAYGNNLADQLATQASFKVQHDKNSKLDTEQIKAIQARQNNERVPVGYPKQYTYELRNNKCMVLRKDGWREIPPSRERYKLIKEAHDISHASREAVLLKIQENYWWPKMKKDVSSFLSTCNVCKMVNPLNLKPISPQAIV

SEQ ID NO: 8327 - protein, 463 aa, synthetic construct
DIEKLIQNQIDKTNINKDKLRELLLNKREILAKSLTDCGKVKSNAEIRGKLHHKQRQYKIRREDKETIGKIINNLMEQGVIKKCRSPTNSPIFLKKKPDGSWRLLLDCKALNECTNPKQGQSISSHGSIEKLTREKYHTTLNIANGFWSIPIVEKDQFKTAFTYQGQQYQWTRLPEGWCNSTVIFNEAIRRVLDDNPKITRFGGVIHFSNDNAESHIKLLKQILEKLDNHGLKIDLRKSQIGRYAVDFLGHQISETEDRLSRKFKEEVSQVKPPKTRKELQSVLGKFNFAREFVINYAGKAASLFKLTNKEPFQWDTNAQECLNQLQQDIQKAVPHSTRKPKSSLILDIYVSKDSSVTAVKQKSVTGEETLKYLSFNFSKAEKKFAKDERLLATLFCTLKQTCQMVTSKEKITVRTSYPELAGVTRESQRNHKALKCRWKKWESLLYDQRISFELRNGIEENE

SEQ ID NO: 8328 - protein, 714 aa, synthetic construct
VDVPAVTKQKIEESDFSPAGKKKLREIIASAKVARFKNDCGDLGPRFVHHIEGGVHPPVRQYPLNPGAVEEMDKIVKELGSLGIIREELNPITNSPIQAVKKPESAGGGWRPVINFKALNRRTIANRASLINPQGTLKTLRVKKFKSCIDLANGFFSLRLARQSQGKTAFTHKGKSYVWQRLPQGYKNSPNVFQSAVMEVLGDVGATVYIDDVFIADDTEEEHLERLRKVIENLTKAGLKLNLKKCQFGQFQVNYLGFQVTSDLGLSDGYREKMMNIQPPQSENELQKILGLCNYVRDHVPNYQKYAKPLYNCLKKSVENEGGGKRPWVWTAANQRDLEDLKKAIQAAVRLEPRSLSDRLVAEINCEEDDAMIKVSNENGGLVTLWSYTLTSVEKKYPQEEKELAVLARYWSVLKDLAQGQPVKVITQSQVHKYLRKGTVESTKATNARWGRWEDILLDPELEIGPAQPTNKKRQQETPEKPGQPEWTLYTDGSKKESDQVAYWGFILKQDGKERCRQKGKAPGSAQAGEVTAILEGLLELGKRKIKSARLVTDSYYCAQALKEDLAIWEENGFETAKGKPVAHRDLWKKIAELKMQLELEVEHQRAHTHEGAHWRGNDEVDCYVQQRKIVFVGIEKWDSTPRGREVPEEYVDEVVRSVHEALGHAGVRPTRKELEEHELWIPVKQVQRVLRDCEVCGKYNAGRRGQRLEGLTI

SEQ ID NO: 8329 - protein, 715 aa, synthetic construct
VNIPEATEQKLEESDFSPEGKEKLRKIITRATVARFKNDCGDLGSKYVHTIEGGVHPPVRQYPLNPGAVEEMDKIVTELSALDIIREEPNPITNSPIQAVKKPEAAGGGWRPVINFKALNRRTVANRASLINPQGALKTLQVKRFKSCIDLANGFFSLRLAKQSQGKTAFTHKGKAYVWQRLPQGYKNSPNVFQAAVMDVLKDLGVTIYIDDVFLADDTEEEHLQRLRQVVERLTEAGLKLNLKKCQFGQFRVNYLGFQVAADLGLSDGYREKLNQVRPPTSENDLQKILGLCNYVRDHVPNYQKYAKPLYACLKKKGEESEEETPKKWSWTATDQQNLGRLKAVIQDAIRLEPRSLTTRLVAEVSCEDDDAVVKVKNEGGGMVTLWSYTLSSVERKFPQEEKELAVLARYWGTMKDLAQGQGIKVITQSQVHRYLRKETIESTKATNTRWGRWEDILLDPDLEIGPAQPANRKAQKPQETEEKSYEWILYTDGSRKGQDDTAYWGYILKQDGKEQFRQKGRVSGSAQAGEVTAILEGLLELEKRKVKTARIITDSYYCAQALKEDLTIWEENGYEGAKGKMVAHQDLWKKIAELRLKMCLDVVHQKAHGKEGAHWKGNDEVDRYVQQRRIVFVGREKWEQTPKGRVVPESSVVEVVQAVHEALGHVGTMSTRKELEKQQLWIPVGRVRQVLKDCNVCGRYNAGRRGKRVDGLTI

SEQ ID NO: 8330 - protein, 672 aa, synthetic construct
VNIPEATEQKLEESDFSHEGKEKLRKIITRATVARFKNDCGDLGSKYVHTIEGGVHPPAVKKPEAAGGGWRPVINFKALNRRTVANRASLINPQGALKTLQVKRFKSCIDLANGFFSLRLAKQSQGKTAFTHKGKAYVWQRLPQGYKNSPNVFQAAVMDILKDLGVTIYIDDVFLADDTEEEHLQRLRQVVERLTEAGLKLNLKKCQFGQFRVNYLGFQVAADLGLSDGYREKLNQVRPPASENDLQKILGLCNYVRDHVPNYQKYAKPLYACLKKKGEESEEGTPKKWSWTATDQQNLGRLKAVIQDAIRLEPRSLGVAEVSCEDDDAVVKVKNEGGGMVTLWSYTLSSVEKKFPQEEKELAVLARYWGTMKDLAQGQGIKVITQSQVHRYLRKETIESTKATNTRWGRWEDILLDPDLEIGPAQPANRKAQKPQETEEKSYEWILYTDGSRKGQDDTAYWGYILKQNGKEQFRQKGLVSGSAQAGEVTAILEGLLELEKRKVKTARIITDSYYCAQALKEDLTIWEENGYEGAKGKMVAHQDLWKKIAELRLKMCLDVVHQKAHGKEGAHWKGNDEVDRYVQQRRIVFVGREKWEQTPKGRVVPESSVVEVVQAVHEALGHVGTMPTRKELEKQQLWIPVGRVHQVLKDCDVCGRYNAGRRGRRVDGLTI

SEQ ID NO: 8331 - protein, 548 aa, synthetic construct
VKKFKSCIYLANRFFSLRLAKQSQGKTAFTHKGKAYVWQRLPQGYKNSPNVFQSAVMDVLSGLGATVYIDDVFIADDTEEEHLERLQKVVERISAAGLKLNLKKCQFGQFQVNYLGFQVAMDLGLSDGYREKINQITPPTTLNELQKILGLCNYVRDHVPGYQQYAKPLYACLKTKEVLRNGKPDRNWNWTATDQDNLRKLKDAIQQAVRLEPRSLTTKLVAEVSCEEEDAVLRVSNEGGGLVTLWSYTLSSVEKKYPPEEKELAVLAKYWGALKDLAQGQTIKVTTRSQVHRFLRKGTVESTKATNTRWGRWEDILLDPDLEISPEKLPSKKTTKEETTDKKPYEWTLYTDGSKKGQDDNAYWGFILKLNEKESFRQRGRALGSAQAGEVTAIMEGLLELGKRKIKRVRIITDSFYCAQALQEDLTIWEENGFESAKGKMVAHQDTHWRGNNEVDRYVQQRKVVIVGIEKWDKTPKGRVVPEEFVKEVVQAVHEALGHAGTIPTRKELEKQDLWIPEKQIRRILKDCETCGKFNAGRRGQRVDGQTI

SEQ ID NO: 8332 - protein, 374 aa, synthetic construct
MKEVLIGANLAIGKNDTGLISKRFQHTIHGGQHRPQKQYPLTRGAKSELEIAIKELEQQGIIQKVTYALTNSSLQVVSKPDGTFRMITNYKALNKVTKKDKRYLINPQTTLEQVAGKIYLTSIDLANGFWSVPLDPDSREKTAFTFGTKHYVYCRLPQGYVNSPNHFQAIVRELMKDDLALVYIDDVLIGDDDQDKHVERVARIIKTLSEAGFKIGLKKCQIGRSEVNYLGYSVSKEGREACIEMRKKVAEITAPVSRKGVKKIMGILGYLRPVVKDFSLYAKPIYETLKGDFIWSSEAQGGLDQLKTAVAISGPLVGRQEEDDLSIKLDIYKNGYGMVLVNHSNQTLIKHLTGIWPRAEQKCSDIEKCLAAII

SEQ ID NO: 8333 - protein, 691 aa, synthetic construct
VDLEHEINRLVKETLLPKNELRKLLEKYRNSFAKSKNDCGKLDDKYEYTILGGIPAPQRQYPLNKAAYPEIRGTLNELLRKGIISVGENCPTNAPIQAVIKIDGSYRLVCNFKALNRLTVPDTRYLINARDATNCLDDGKILSKIDLANGFWSVPLAKDSRARTAFTFEGKQYVFNRLPMGFCNAPNAFQAIILEILEGLPVTAYIDDVLIATQTTEEHMRVLSETIRKLADAGFLLNLKKLELGKENVNFLGFEISGAERGIAKSTQEKLEELKKERITNLRQLQSLLGRLNFVRDLIPGYSAKAKILYKATAGKDFHWDDRLESIKCDIINMALASGRIVRRNPDKNLRVKIDNTPEEMELILYNEGDTKSPVMFISHEKPANHKKHENMSPVDILATIARNLLVIKALAAEKLIIIVAKGEGIDLLAREAKNLVNENKRVHVFTWSKWIKIIDDNQFEFRNEKSPKKDRRTVIDPEQICYFTDGSSEKGETWWGFMVKLKGKIIHKEKGRLDNDKSAQEAEVTAVAKAIMHMRDNNRKKCVLVTDSEYVYLGIVQNLSTWEQNNFNNAKGKPLAQVELWKVISECAKVVQPRVLHQSSHTVQKTPAAVGNREVDQYVRVRAITKESEGNLLQELHDKLNHPSTTYVAKYCKQLGLHVQNLKTSYQKIKIKCPDCRKVMSSVHHDFGHI

SEQ ID NO: 8334 - protein, 525 aa, synthetic construct
FPVYKAEEEENEEIPDEISRLLEQERKTIQPYGDELEVINLGTKEDKKEIKVGASLETSVKKQVIELLKEYVDVFAWSYRDMPGLDTDIVVHHLPLKPECPPVKQKLRRTRPDMALKIKEEVQKQIDAGFLVTSNYPQWLANIVPVPKKDGKVRMCVDYRDLNKASPKDDFPLPHIDVLVDSTAKSKVFSFMDGFFGYNQIKMAPEDREKTSFITPWGTFCYKVMPFGLINAGATYQRGMTTLFHDMIHKEIEVYVDDMIVKSITEEDHVKYLQKMFQRLRKYKLRLNPNKCTFGVRSGKLLGFIVSQKGIEVDPDKVKAIREMPAPRTEKEVRGFLGRLNYISRFISHMTATCGPIFKLLRKEQGIVWTEDCQKAFDNIKKYLLEPPILIPPIEGRPLIMYLTVLENSMGCVLGQQDETGRKEHAIYYLSKKFTECESRYSILEKTCCALAWAAKRLRHYMINHTTWLVSKMDPIKYIFEKPALTGRIARWQMLLSEYDIEYRSQKAIKGSILADHLAHQPLED

SEQ ID NO: 8335 - protein, 454 aa, synthetic construct
FSSVENRREEQILFDVVNIPYNYNAIFGRATLNKFKAISHHNYLKLKMPGPKGVIVVKGLQPSAASKRDLAIINRAVHNVETEPHERPKHTPKPTPHGKVAKVQIDDFDPTKLVSLRSPRLKLRKMSADRQEAAKAEIHMNPLNIPKTSFVTPFGTFCQLRMPFGLRNAGATFARLVYKVLGKQLGRNVKAYVDDIVVKIHKAFDHANNLQETFDSLRAAGIKLNPEKCVFSVRAGKLLGFLVSERGIEANPEKIDAIQQMKPPSSVHEVQKLAGRIAALSRFLSKAAERGLPFFKTLRGAGKFNWTPECQAAFDKLKQYLQSPPVLISPPLGSELLLYLAASPVAVSAALVQETESGQKPVYFVSEALQGAKTRYIEMEKLAYALVMASRKLKHYFQAHKVIVPSQYPLGEILRGKEVTGRLSKWAAELSPFDLHFVARSAIKSQVLADTTEY

SEQ ID NO: 8336 - protein, 405 aa, synthetic construct
VNPLSAPVLREEIAALLAKGAIEPVPPAEMESGFYSPYFIVPKKSGGSRPILDLRVLNRCLHKLPFRMLTQRRILQCVRPRDWFAAIDLKDAYFHVSILPRHRQFLRFAFEGRAWQYKVLPFGLSLSPRVFTKLAEGALAPLRLAGIRILSYLDDWLILAHSREQLIVHRDEVLRHLRLLGLQVNREKSKLAPVQRISFLGMELDSITMRLLGHMASAAAVTPLGLLHMRPLQHWLHDRVPRRAWHAGTHRVSVTALCRRALSPWNDPSFLQAGVPLGQASSHVVVSTDASNTGWGAVCRGHAAAGLWKGAQLHWHINRLELLAVFLALHRFLPVLERQHVLVRTDSTAAAAYINRMGGMRSRRMSQLARRLLLWSHPRLKSLRAIHVPGTLNRAADALSRQLLR

SEQ ID NO: 8337 - protein, 236 aa, synthetic construct
NTEELEKLLADYPAEARVFCALEPKRDGTSRPIIKPNKPLNQWLKRMKRALYRQRRDWPTFIHGGVKKRSYVSFARPHANKNTVITIDIKDCFGSITQSEVQQALVSKLGLPDGLASRLAAKLCYKRRIPQGFATSSYLTNLYLNDTLLKINRQLKRKQIDMTVYVDDIALSGQKVDSAVIINLVTLELSRARLAISKAKVKVMRSHSPQIICGLVVNKGVALSRQKRKEIFSDIA

SEQ ID NO: 8338 - protein, 252 aa, synthetic construct
FHITSKKRLAILLHSSVKELNNIVRSKDQMYQYFNETQTDNSGNIIKVRPIQNPHDRLKQIHSRIGKFLGNLKAPEYLHSKRSKSAISNAKAHVGIKGHTLNIDITDFYPSTSRAKVQAFFGYTLQYPTDIAKYLSEICTVKNCLPTGSPLSSALAFWANKSMFDEIYRVAKSRAITMTVYVDDISFTGRAVNQNFLKKIIQIVGKYQHKIKQEKIKFFPEYSVKFVTGVAILNGRLQPAHRHYRDIRVLQK

SEQ ID NO: 8339 - protein, 292 aa, synthetic construct
ARKENYYKAFDHASKNKHGKKAIIKFEADLEKNLSDLLYSFENGTFVTSPYRFMTVHEPKKRLIGMLPFPDHVQHWAMLNEVEDYFTRSFSAYTYGGVKGRGPHAYMRMIRKVLRKYPERTTDYLLCDIHHFYPTVNHPVLKSQLRTRIKDNHLLRRLDEIIDSVEGDTGMFPGTKLAQFFSLVYLYLFDHDLKRCFHVGECPALVEYYTKRYIEESIATAKTEHDYEELSKGIQYLSDRFKGYLNRLDFCYRLADDVLILHEDTVFLHLVIEWIGLYYANELRIGLNPRWK

SEQ ID NO: 8340 - protein, 294 aa, synthetic construct
FSDSLPPIFSSEELSLKESNINVSKDYLSKNGSNKRSKLINFSIPKNSSFRRTLSIVHPLHYIKFANLIDEQWENISKHFEKSSVSLTKIIKNNSKLEREHGFEAMRYKQIENLSLNRFILKIDINRYYPSIYTHSIPWALHGKKYSKLNISEENLGNNLDTLTRNMQDGQTIGIPIGPFSSDIIQEIIGTAIDEDFSKKMEYKVPGYRYTDDMEYYFKNLNEANNALSVMNNVLKNYELDLNSEKTVIEKIPMVLEKEWIRSLKNFRFNKNYSKKNVRKEKELLIEYFNSIFN

SEQ ID NO: 8341 - protein, 434 aa, synthetic construct
VPPALWGSRHNQRRFLRNVKKFISLGKHAKLSPQELTWKMKVQDCAWLRGSPGACSVPAAEHRRREGVLARLLCWLMGTYVVELLRSFFYVTETTFQKNRLFFYRKSVWSPLQTLGVRQHCTSVRLRELSAAEVRRQHEARATLLTSRLRFLPKPGGLRPIVNMDYVAGARALCRDKKIQHLTSQVKTLFSVLNYERARRPRLLGASVLGMDDIHRAWHDFVLRVRAQDPAPRLYFVKVDVTGAYDALPQDRLAEVVANVLRPHENTYCLRRYAVVRRTAQGHVRRSFKRHVSTFTDLPPYMRQFVERLQETTSLRDSVVIEQSYSLNEASSGLFQLFLSLVYSHVIRIGGNLLLRLVDDFLLITPHLKRAQAFLRTLVRGVPEYGCSANLQKTAVNFPVEDMALGSTAPLQLPAHCLFPWCGLLLDTQTLEVS

SEQ ID NO: 8342 - protein, 414 aa, synthetic construct
LDLKVIKPSKSPHMAPAFLVNNEAEKRRGKKRMVVNYKAMNKATVGDAYNLPNKDELLTLIRGKKIFSSFDCKSGFWQVLLDQESRPLTAFTCPQGHYEWNVVPFGLKQAPSIFQRHMDEAFRVFRKFCCVYVDDILVFSNNEEDHLLHVAMILQKCNQHGIILSKKKAQLFKKKINFLGLEIDEGTHKPQGHILEHINKFPDTLEDKKQLQRFLGILTYASDYIPKLAQIRKPLQAKLKENVPWRWTKEDTLYMQKVKKNLQGFPPLHHPLPEEKLIIETDASDDYWGGMLKAIKINEGTNTELICRYASGSFKAAEKNYHSNDKETLAVINTIKKFSIYLTPVHFLIRTDNTHFKSFVNLNYKGDSKLGRNIRWQAWLSHYSFDVEHIKGTDNHFADFLSREFNKVNSSGGS

SEQ ID NO: 8343 - protein, 906 aa, synthetic construct
AASSLSTLQHVTLQKLNKLDSQRQQFESDKKSILEQVSSVPDHRSKVEALLDGFELHGIAPKQADLSISNLKHFVHQAKHDPSVSASLLKDWQSRLEHELNVKSNKYEYAALFGKLVTEWIKHSTLVKSADVSDGSIAKGRKKMQEQRQSWENYAFVEKEVNQSTIEQYLSDIFGDALQTEKIKKSPLRVLRDSMKEVMDFKSDLDTSEKDFSSNKRFGHSAPHGSRFTIELLQSCIRGVKKADLFTGRKLEMIIDLEKQPAVLKELVDVLNMDVDGLDHWEWDGPVPLNMRRQTNEIHQAILLHFIGKTWAVALKKAFTNFYHSGAWLQAPYRSMPKKIRQRREHFIENSNKSGDSVRNYRRQKYQQEYFMTQLPSNAFEDAREYDAAEGQEKNSHIATKQTMLRLLTTEILLNTKVYGECSVLQSDFKWFGPSLPHDTIFAVLEFFGVPAKWLRFFKRFLEVPVVFAQDGAGAKARVRKCGIPNSHILSDALGEAVLFCLDFAVNRRTKGANIHRFHDDLWFWGQETTSVQAWEAIKEFTEVMGLQLNEEKTGSSIIVADKSRARVPHPNLPEGNLHWGFLELDASAGRWVIDRAQVDEHITELRRQLDACHSVMAWIQAWNSYVGLFFNTNFAQPANCFGRQHNDMIIETFSHIQRSFFGKYGTANVTEYLRSVLKERFQTTDAVPDAFFYFPVELGGLGLNNPSISAFATYQNSSRDPSARIERAFEEEREAYDTAKQRWDAGDVPCPNRETDEPFMSFEEYTAFREETSHPLFEAYMNLLECPVEERVETSDEMYEALRRSDAPHALGSNHYWLWIFNLYAGDLKQRFGGQGVQLGERDLLPVGLVEVLKSEKIYPGSNPFGINQLFTLFRLRKKLRMSVANGWGGYDVTKEPRRTNKDEL

SEQ ID NO: 8344 - protein, 862 aa, synthetic construct
PSTQTEFEKQLQQMLLDADALQSDEERVKLRTVLTKYRASFSQDSMDCGLTHIHMIRIPTHPDAAPAYVRQYKIPLASYGPVQEIIDDLLDKGIIRPCNSTYSAPLWPVLKPNGKWRLTIDYRRLNDQVPLSRWPMTQLEQELPRVRDAKYFSTLDVASGFWTIPVHVEDQHKLAFTFAGRQFTFTRCPFGYSNSPAEFNIFLNKACPDARERGTLIYVDDVLIRNNSLDAHLEEIDHVLDQLTKAGAKISLAKCQWCKTKVNYVGLLVGPDGVLPQPCRAQGIVDIAEPKTIHALRSFLGVCNYSRQFIENFAELAKPLYQLLKQDVPFIWGEAQAQAMQTLKDKLASAPCLTYPDHSREFYLQVGFSEHCVSAGLYQVHDRDKRVVAYASKALMAPELKYSDCEKALLATVWAVKHFSNYLGGQKIIVETNHQPVVFLNSQRIREGVVTNARVASWLMALQSFEVEVRYAQNSRLPLGTDLAACQRCETDIPATSVPIPNLASQKPTNHRYFDPKECENIPTVYVDGCSFRHDQEGLKAGAGIVWLDDNPCEPQQFKLGSQTSQYAEIAAILITIQLAIDQGVKTLVICTDSNYARLSFTCHLPIWKTKGFLTSGRKAVKHTELFTAADYLVVRHDMLVYWKKVRGHSRVPGTDKTYNDQADSLAKRGALEGVSWVFDPLKYPTQPNPTVLAVTRAQAKQTSTTEIPPCAAVSIDPEITDADLITLQDADPDIKSIKAFLLDPTNNPITSQMLEASIPLKQLLDNRAFLKVVKGLLVHVTETHTSPAFVVPPCHRGVMLGHAHDSPSAGHKGIKETYRTLKQVAFWPRMREHVASYIKGCLVCCQFQPANPLHRAPLQRK

SEQ ID NO: 8345 - protein, 478 aa, synthetic construct
QKEPTQDVTLPQTWLTDFPQAWAETAGMGLAVQQAPLVIELKATATPVSIKQYPMSREARRGIKPHIQRLLDQGILVPCQSPWNTPLLPVKKPGTNDYRPVQDLREVNKRVEDIHPTVPNPYNLLSGLPPERQWYTVLDLKDAFFCLRLHPTSQPLFAFEWRDPETGMSGQLTWTRLPQGFKNSPTIFDEALHRDLADFRIQHPDVTLLQYVDDLLLAADTEQDCLKGTQALLQTLGELGYRASAKKAQICQREVTYLGYKLKGGQRWLTEARKETVLQIPTPKTARQVREFLGTAGFCRLWIPGFAELAAPLYPLTKEGSAFNWGEKEEKAFQELKQALLTAPALGLPDLTKPFQLFVDEKQGIAKGVLTQKLGPWRRPVAYLSKKLDPVAAGWPPCLRMVAATALLTKDAGKLTMGQEIVILTPHAVEAVLKQPPDRWLSNARMIHYQALLLDTPRVQFHPTVALNPATTEPLPES

SEQ ID NO: 8346 - protein, 478 aa, synthetic construct
SKEPKQDVTLPQTWLSDFPQAWAETAGMGLAVQQPPIVIQLKATATPVRIKQYPMSREARRGIKPHIQRLLDLGILVPCQSPWNTPLLPVKKPGTNDYRPVQDLREVNKRVEDIHPTVPNPYNLLSSLPPERQWYTVLDLKDAFFCLPLHPESQPLFAFEWRDPETGRSGQLTWTRLPQGFKNSPTIFDEALHRDLADFRIQHPDLTLLQYVDDLLLAADTEQDCLKGTQALLQTLGELGYRASAKKAQLCQREVTYLGYKLKGGQRWLTEARKETVLQIPTPKTPRQVREFLGTAGFCRLWIPGFAELAAPLYPLTKEGNAFNWGEKEEKAFQELKQALLQAPALGLPDLTKPFQLFVDEKQGIAKGVLTQKLGPWKRPVAYLSKKLDPVAAGWPPCLRMIAATALLTKDAGKLTLGQEIVILTPHAVEAVLKQPPDRWLSNARMIHYQALLLDTPRVQFDPSVALNPATTETLPES

SEQ ID NO: 8347 - protein, 446 aa, synthetic construct
LTQGDIQEINPEVWATEGKYGCLDIPPIKIEMQKDTPAIRVKQYPMSPEGKKGLASVIEHLLKENILEPCMSPHNTPILAIKKDEGKFRLVQDLREINKRTIARHPVVPNPYTLLSKIPREHTWFTVIDLKDAFWACPLAEECRDWFAFEWEHPDRGRKQQLRWTRLPQGYTESPNIFGQALETLLEQFSPKEGVQILQYVDDLLISGETEKEVKDVSIQLLNFFGEKGLKVSQSKLQFVETEVTYLGHIIGKGSKRLSPARISGIVSISPPKTKRDIRKLLGLFGYCKHWIDKYTQGVKFLYDKLIDQEPMNWTESDEKQLQDLKEKLSSAPVLSLPDLKKEFDLFVNTEEGIAYGVLTQEWGGYRKPVAFLSKLLDPVARGWPACLQAVAAAAILIEEAQKLTLQGKIPHDLKTILSQRAQDNLELTTSPHQRDRTLTFKRNKR

SEQ ID NO: 8348 - protein, 468 aa, synthetic construct
LTQEDIEEINPEVWAEEGKSGLLDIPPIKIEMQKETPPIRVKQYPISPEGRKGLAPIIEQLLKEGILEPCMSPHNTPILAVKKAEGKYRLVQDLREINKRTVTRHPVVPNPYTLLSQIPREHAWFTIIDLKDAFWACPLAEECRDWFAFEWEHPETKRKQQLRWTRLPQGFTESPNLFGQALEKLLEQFSPEEGVQILQYVDDLLISGEDQSEVRETSIQLLNFLGEKGLKVSKSKLQFVESEVTYLGHLIGKGYKRLSPERIAGILSIPPPKTKRDIRKLLGLFGYCRLWLDKYTQSVKFLYDKLVDSEPIEWTEEDEKQLKDLKEKLSSAPVLSLPDLKKEFDLFVNTEEGVAYGVLTQEWGGCKKPVAFLSKLLDPVARGWPTCLQAVAAAAILIEETQKLTLQGKIRVHTPHDLKTILSQKAQKWLTDSRILRYEIALMNTDNLEFTTSPIQRDRTLTFKRNKK

SEQ ID NO: 8349 - protein, 644 aa, synthetic construct
LTLEDEEKINPEVWYTPDSVGRLDIEPITVTIKDPDTPIRIKQYPISLEGRRGLKPVIERLLSKGLLEPCMSPHNTPILPVKKPDGSYRLVQDLREINKRTVTRFPVVANPYTLLSKLSPENQWYSVIDLKDAFWACPLDEESRDYFAFEWEDPETHRKQQLRWTVLPQGFTESPNLFGQALEQLLQEYQTGEGVTLIQYVDDLLIAGETEEEVRKESIKLLNFLGLKGLKVSKAKLQFVEEEVKYLGHWLSKGEKKLDPERVKGILSLPPPKSKRQIRQLLGLLGYCRQWIENYSSKVKFLYEKLSQGGLVKWTEEDEKQLKRLRQDLIQAPVLSLPDLKRPFYLFVNTDNGTAYGVLTQEWAGKKKPVGYLSKLLDPVSKGWPTCLQAVVACALLTEEAHKITFNSELKVLSPHNIRGILQQKADKWITDSRLLKYEGILLDSPKLTLEVTGLQNPAQFLYDEKPVAHNCMATIEEQTKIRPDLEEEELETGERLFVDGSSRVIEGKRVSGYAIIGGPEVIESGPLNKTWSAQACELYAVLRALERLKDKEGTIYTDSKYAFGVVHTFGKIWENAADQEAKKAALTESEQKLKALFLPKRLSIIHCPGHQKGHSAEARGNRMADQAARKAAITETPDTSTLL

SEQ ID NO: 8350 - protein, 644 aa, synthetic construct
LTQEDEEKINPEVWHTEDEAGRLDIEPISIEIERPEDPIRIKQYPISLEGRRGLKPIIERLLKKGILEPCMSPHNTPILPVKKPDGSYRLVQDLREINKRTVTRFPVVANPYTLLSRVSPENQWYSVIDLKDAFWACPLAEESRDYFAFEWEDPETNRKQQLRWTRLPQGFTESPNLFGQALEQLLQQFSPGEGVTILQYVDDLLIAGETEEEVREATIKLLNFLGEKGLKVSKSKLQFVEPEVKYLGHWISKGKKRLDPERVAGILSLPPPKSKRQIRQLLGLLGYCRQWIENYSQKVKFLYEKLTEGGKIKWTEEDEKQLKRLKQALITAPVLSLPDLKKPFHLFVNTDNGTAYGVLTQEWAGVKKPVGYLSKLLDPVSRGWPTCLQAIVAVALLIEEAQKITFGGELIVYTPHNVRTILQQKAEKWLTDSRLLKYEAILLNAPKLELRVTKLQNPAEFLYLEKPVSHNCTDTIEEQTKVRPDLEDEELEEGEKWFVDGSSRVIEGKRKSGYAIINGKEVIESGPLNASWSAQACELFAVLRALERLKGKVGTIYTDSKYAFGVVHTFGKIWENLADQEAKKAALTESRQKLKALFLPKRLSIIHCPGHQKGHSAEARGNRMADQAARKAAITETPDTSTLL

SEQ ID NO: 8351 - protein, 646 aa, synthetic construct
LTLEDEEKINPEVWHTEDEAGRLDIEPITIEIERPEDPIRIKQYPISPEGRRGLKPIIERLLKKGILEPCMSPHNTPILPVKKPDGSYRLVQDLREINKRTVTRYPVVPNPYTLLSKVSPEHQWFSVIDLKDAFWACPLAEESRDIFAFEWEDPETGRKQQLRWTRLPQGFTESPNLFGQALEKLLQQFSPPEGVTILQYVDDLLIAGETEEEVREATIKLLNFLGEKGLKVSKSKLQFVEPEVKYLGHLISKGQRKLSPERVAGILSLPPPKSKREIRKLLGLLGYCRLWIEGYTETVKFLYEKLTEGGKIKWTEEDEKQLQELKQALTTAPVLSLPDLKKPFHLFVNTEEGIAYGVLTQEWGGCKKPVAYLSKLLDPVSRGWPTCLQAVAAVAILIEEARKLTFGGKLVVYTPHAVRAILQQKAEKWLTDSRLLKYEAILLDKPRLELHVTKLVQNPAEFLYLEPKPVHHDCTETLEENTKRRPDLEDEELEEGEKWFVDGSSRVIEGKRKSGYAIINGKEVIESGPLNASWSAQACELFAVLRALERLKGKVGTIYTDSKYAFGVVHTFGKIWENLADQEAKKAALTESRQKLKALFLPKRLSIIHCPGHQKGHSAEARGNRMADQAARKAAITETPDTSTLL

SEQ ID NO: 8352 - protein, 480 aa, synthetic construct
LTQEDEEKINPEVWHTEEEAGRLDIEPISIEIERPEDPIRIKQYPISLEGRRGLKPIIEQLLKKGILEPCMSPHNTPILPVKKPDGSYRLVQDLREINKRTVTRYPVVPNPYTLLSKVPPEHQWFSVIDLKDAFWACPLAEESRDIFAFEWEDPETRRKQQLRWTRLPQGFTESPNLFGQALEKLLQQFSPPEGVQILQYVDDLLISGEDEEEVREATIKLLNFLGEKGLRVSKSKLQFVEPEVKYLGHLISKGSKRLSPERIAGILSLPPPKSKREIRKLLGLLGYCRLWIEKYTQTVKFLYEKLTEGDKIKWTEEDEKQLKKLKQKLTSAPVLSLPDLKKPFHLFVNTEKGVAYGVLTQEWGGVKKPVAYLSKLLDPVSRGWPTCLQAIAATAILIEEAQKLTFGGKLIVYTPHNVRTILNQKAEKWLTDSRLLKYEAALMNKPRLELHVTKIVEDPAEFTYTPVQHDCTLTLKRQKK

SEQ ID NO: 8353 - protein, 465 aa, synthetic construct
LTLEDEEKINPKVWHTGREAGRLDIEPISIEIERPEDPIRIKQYPISLEGRRGLKPIIEDLIKKGILEPCMSRHNTPILAIKKTDGSYRLVQDLRAINERTKTRFPVVANPYTLLNRVSPEDTWYSVIDLKDAFWTCPLAEGSRDYFAFQWEDPDTNRKQQLRWASLPQGFVDSPNLFGQALEQLLSQFSPGEGTKILQYVDDLLVAGETEEDVRECTIELLNFLGEKGLKVSKSKLQFTEPEVKYLGHWITKGKKKLDPERVAGILELPPPKNKRQVRQLLGLLGYCRQWIEGYSEKVKFLYEKLTTDKIKWTEQDEKELQRLKEALITAPVLSLPDVKKKFQLFVDVSNHTAHGVLTQEWAGDKKPVGYLSKLLDPVSRGWPTCLQAIVAVALLIEEAKKITFGGDLVVYTPHNVRLILQQKAERWLTDARLLKYEAILIHAPELELRVTKASNPAEFLYLGK

SEQ ID NO: 8354 - protein, 647 aa, synthetic construct
LPTQVEDAVVPWVWSTEGPGKSIAVEPVVIELKEGEQPVRIKQYPMKPEARRGIKPIIEQFLKLGILEECQSEYNTPILPVKKPNGEYRLVQDLRAVNKITEDIYPVVANPYTLLTSLSPEHQWFTVIDLKDAFFCIPLEPESQKIFAFEWENPETGRKTQLTWTRLPQGFKNSPTIFGEQLAKDLEEWKAPPESGVLLQYVDDLLIATETKEACIKATIALLNFLGQKGYRVSKKKAQLVQQEVIYLGYEISGGQRKLGPDRKEAICQIPKPKTVKELRSFLGMVGWCRLWIPNYGLLAKPLYELLKEGSDKLNWTKEAEKAFQELKQALTTAPALGLPDLSKPFQLFVNEKQGIALGVLTQKLGPWRRPVAYLSKQLDTVAAGWPSCLRAVAAVAILIQEARKLTMGQKMVVYVPHAVSAVLEQKAGHWLSSSRMLKYQAILLEQDDVELAVTNVLNPATFLYSEPEPVHHDCLETIEASYSSRPDLKDTPLEDAEEWFTDGSSYVISGKRKSGYAVTTCKEVIESGPLNPSYSAQKAEIIALTRALELAKGRTVNIYTDSRYAFGVVHAHGAIWKELADREAKKAAKTELQQSLKALFLPKRLSIIHCPGHQKGHSAEARGNRMADQAARKAAITETPDTSTLL

SEQ ID NO: 8355 - protein, 647 aa, synthetic construct
LPKQVEDAVVPWVWSTEGPGKAVAVEPVVIELKPGEQPVRIKQYPMKREARKGIKPIIERFLKLGILEECQSPYNTPILPVKKPNGEYRLVQDLRAVNKITVTIYPVVPNPYTLLSSLSPEHQWFTVIDLKDAFFCIPLEPESQKIFAFEWEDPETGRKTQLTWTRLPQGFKNSPTIFGEALAKDLQEWKAPPESGTLLQYVDDLLIATETKETCIKATIALLNFLGEKGYRVSKKKAQLVQQEVTYLGYEISKGQRRLSPDRKEAICQIPKPKTVRELRSFLGMVGWCRLWIPNYGLLAKPLYELLKEGSDPLNWTEEEEKAFQQLKQALTTAPALGLPDLSKPFQLFVNEKQGIALGVLTQKLGPWKRPVAYLSKQLDPVAAGWPSCLRAVAATAILIQEARKLTLGQKMVVYVPHTVSAVLEQKAGHWLSSSRLLKYQAILLDQPDVELKVTKVINPATFLYSEPEPVHHDCLETIEASYSSRPDLKDTPLEDAEEWFTDGSSYVINGKRKSGYAIITCKEVIESGPLNPSYSAQKAELIALTRALELAKGRTGNIYTDSKYAFGVVHAHGAIWKELADREAKKAAKTDLQQPLKALFLPKRLSIIHCPGHQKGHSAEARGNRMADQAARKAAITETPDTSTLL

SEQ ID NO: 8356 - protein, 666 aa, synthetic construct
LPTQVVTAVVPQVWLSPHLDLFYRTDFPKAWAETEGPGKAIQVEPVVIELKPGEQPVRIKQYPMSPEARRGIKPIIERLLKLGILEPCQSPYNTPILPVKKPDNGEYRLVQDLRAVNKRTVTIYPVVPNPYTLLSSLSPEHQWFTVIDLKDAFFCIPLAPESQPIFAFEWEDPETGRKTQLTWTRLPQGFKNSPTIFGEALAKDLQEFPAPPEGVTLLQYVDDLLIAAETEEACLKATIALLNFLGQKGYRVSKKKAQLCQQEVTYLGYEISGGQRKLSPDRKEAILQIPKPKTVKELRSFLGMVGYCRLWIPGYAELAKPLYELLKEGSDKLNWTEEAEKAFQELKQALTTAPALGLPDLSKPFQLFVNEKQGIALGVLTQKLGPWRRPVAYLSKKLDPVAAGWPSCLRAVAAVAILIQEARKLTMGQKMVVYTPHAVSAVLEQKADRWLSNSRMLKYQAILLDKPRVELHVTKVLNPATFLYSEPEPVHHDCLETLEESYSRRPDLKDTPLEDAEEWFTDGSSYVISGKRKSGYAIITCKEVIESGPLNPSYSAQKAELIALTRALELAKGRTVNIYTDSKYAFGVVHAHGAIWKELADREAKKAAKTELQQSLKALFLPKRLSIIHCPGHQKGHSAEARGNRMADQAARKAAITETPDTSTLL

SEQ ID NO: 8357 - protein, 651 aa, synthetic construct
LTGQVVTAVVPQLWLTEDEGGLIQVEPVTIELKPGEQPVRIKQYPLSPEARRGIKPIIERLLKKGILEPCQSPYNTPILPVKKPDNGTYRLVQDLRAINKRTVTIYPVVPNPYTLLSSLSPEHQWFTVIDLKDAFFSVPLAPESQPIFAFEWEDPETGRKQQLTWTRLPQGFKNSPTIFGQALEKTLQEFPAPPEGVTLLQYVDDLLIAAETEEECLKATIALLNFLGQKGFKVSKKKLQLCQPEVTYLGHEISGGQRKLSPDRVAAILQLPKPKTVKELRSFLGLVGYCRLWIPGYTELAKPLYELLKEGSPPKDKLNWTEEAEKQFQELKQALTTAPALGLPDLKKPFHLFVNEKEGIALGVLTQKLGGHRRPVAYLSKKLDPVAAGWPSCLRAVAAVAILIQEARKLTMGQKMVVYTPHAVSAVLEQKADRWLSNSRMLKYQAILLDKPRVELHVTKVQNPATFLYSEPEPVHHDCLETLEESYSRRPDLKDTPLEDAEEWFTDGSSYVISGKRKSGYAIITCKEVIESGPLNPSYSAQKAELIALTRALELAKGRTVNIYTDSKYAFGVVHAHGAIWKELADREAKKAAKTELQQSLKALFLPKRLSIIHCPGHQKGHSAEARGNRMADQAARKAAITETPDTSTLL

SEQ ID NO: 8358 - protein, 632 aa, synthetic construct
IPEEVEQAVVPWVWETDTPGKSKAAQPVVVELKEGKEPVRIKQYPIKPEARQGIKPIIDKFLKLGILEECESEYNTPIFPVKKPNGEYRLVQDLRAINEITKDIYPVVANPYTLLTSVSEKHEWFTVIDLKDAFFCIPLEKESRKLFAFEWENPDTGRKTQLTWTRLPQGFKNSPTIFGNQLAKELEEWKTTQVKVPPESYVLLQYVDDILIATEEKETCIKLTISLLNFLGQGGYRVSKKKAQLVRQEVIYLGCEISQGQRKLGTNRIEAICAIPEPRNHQELRSFLGMVGWCRLWILNYGLIAKPLYEALKEPRLTWGKQQEKAFLELKQALTEAPALGLPDLSKDFQLFVNERQRLALGVLTQRLGPWKRPVGYFSKQLDTVSAGWPSCLRAVAATVILIQEARKLTLGRKIEVYVPHMVTAVLEQKGGHWLSSSRMLKYQAILMEQDDVELKITNLINPAEFLSEEGPLAHDCVEIIEQTYASREDLKDVLLEQAEEWFTDGSSFGKNATGWAVSNNPQYSAQKAEIIAYIRAKGRTGNFYTDSRYAFGVVHAHGAIWKELADREAKKAAKTELQQSLKALFLPKRLSIIHCPGHQKGHSAEARGNRMADQAARKAAITETPDTSTLL

SEQ ID NO: 8359 - protein, 447 aa, synthetic construct
LTGQVVTAVVPQLWLSLPPDPHLDLFYRTDFPKAAAIDDSLWSESEDEGGLIQVEPVKIKLKPGERPVRIKQYPLSPEAEQGIKPIIERLLKKGILEPTQSPYNTPILPVKKPDNGTYRLVQDLRAINKLTVTITPVVPNPYTLLSSLSPKHQWFTVIDLADAFFSVPLDPESQPIFAFTFENQQYTWTRLPQGFKNSPTIFSQALKKTLQEFPALPEGVTLLQYVDDLLIAAETEEECLKATIALLNFLAQKGFKVSKKKLQLCQPEVTYLGHEISGGQRKLSPDRVAAILQLPKPKTVKELQSFLGLVGYCRTWIPDYTELAKPLRELLRHEGSPPKDKLNWTEEAEKQFQELKKALTTAPALGLPDYKKPFHLHVNEKEGIALGVLLQKHGGHRRPVAYLSKKLDPVAAGWPSCLRAVAAVAIAIQEARHLVMGHKMVVYTPHA

SEQ ID NO: 8360 - protein, 360 aa, synthetic construct
GQYQLQDAYGYCSYPRPQAAKSLLEKSLSDASLHQACQTMYPRQANFDSSDTDEEHHDAIDELLTKLYVSRERIFKREFTPSQLHSVEIEKPEGGTRLLSVPNWHDRTLQKAVTECLGNTLEHIWMKHSYGYRKGHSRLQARDQINQYIQQGYEWVLESDIESFFDSVNWLNLEQRLKLLLPNEPLVPLLMQWVSAAKQTEDEQTLARHNGLPQGAPISPILANLLLDDLDQDMIAKGHQIVRYADDFVLLFKSKAAAESALDDIITALKEHHLAINLEKTRIVEASQGFRYLGYLFGGSQYKLILNGKTLKGETTTEAVDAATAEKVFKQYANDNGVDGEWTYDDATKTFTVTEGGSKL

SEQ ID NO: 8361 - protein, 390 aa, synthetic construct
GWLYNQMAMPETIFQAWYKVASNDGRPGWDNKSIEDYSLQLEENLKALSQALLTGTYKQGPLMKLVLLKPDGKDRVLLIPGVMDRVAQTAAAIVLSPIIEAELGNCTFAYRPGISREGAAREIDRLHREGYQWVLDADIRSFFDNVRHDLLFQRLVELIDDKEMISLLHRWLTAEIVDGINPRIQNTMGLPQGCPISPALANLYLDRFDETMEKEGFKLVRFADDYLVLCKTRPKAEAALKLSETALAELKLELHSDKTRITTFAEGFKYLGYLFIRALVIPTKMHPEEWYDKLGKFKLRKKSEHALPSDPDAMTGETAKFELETDQGEKIELTKNELLQTEFGCKLLESLDKKQLSVDEFLEKVARQDEERQKEKRDALKKLYSPFLNT

SEQ ID NO: 8362 - protein, 324 aa, synthetic construct
LYVEQLATAWHLVQRGSRAAGIDGITVDLFTGIAREQIHQLYRQMRQERYVARPAKGFYLAKQKGGHRLIGIPTVRDRIVQRYLLQSIYPSLENAFSDAVFAYRPGLSIYAAVKRVMERYRYQPTWVIKADIQQFFDQLSWPLLLHQLDQLSLPATWVQWIEQQLKAGIVVSGQFYQPGQGVLPGSILSGALANLYLNDFDRHCLEADIPLVRYGDDCVAVCQSYLEASRSLALMQDWIEGLSLSFHPEKTTIIPPGQAFVFLGHRFRNGTVEGPARQKAEGRRQKAPQPGYGPPQLCSIVKSPRRMLATSTDDYWRDGMTTKL

SEQ ID NO: 8363 - protein, 336 aa, synthetic construct
FTQEHLHFAWLQVCAGSKTAGVDGISVELFESMATEQLQNLVYQLNNETYTASPAKGFYIPKKNGDKRLVGIPTVRDRIIQRLLLDELYFPLEGTFLDCSYAYRPGHNILQAVQHLYGYYQYQPKWIIKADVADFFDNLSWALLLTFLEKLSLEPSVLQLIEQQLQSGMIIAGQYRNFGKGVLQGGILSGALANLYLTNFDKKCLSQGINLVRYGDDFVIACNSWQEANRILDKITVWLGEVYLTLQSEKTQIFTPNDEFTFLGYRFAGGEVYAPPPPKPVLKGEWVINDSGNPYFRTKPRPKKPVSHPPKACSIDKPINFPRASLSHYWQETMTT

SEQ ID NO: 8364 - protein, 268 aa, synthetic construct
IETRREVEAFEANSQSNLKRIADQLLHRKFIFPAAKGVPIQKAKGKRGDIRPLVVAKVEARIVQRAIHDVLIEVPSIRRYVRTPYSFGGVRKEKDDSVSAVPAAIDAAMAAIGDGFSYYIRSDITAFFTKIPKSAVAALVSDAVGHQSEFMDLFRRAIHVELENMARLARTVNAFPIYDIGVAQGNSLSPLLGNILLYDFDQQMNGNPDAVCLRYIDDFIIFAKTQQLAENMFQKAIHILASHGMSVAKHKTVKGLVRDKFEFLGIEF

SEQ ID NO: 8365 - protein, 263 aa, synthetic construct
PTIRTEIEQFSLSLEKNLRRIADQLREKRYVFSQSYGVAVKKKNNPSKKRPIVISPIPNRIVQRALLDVVQEIPSVRAKLDSGFNFGGIAEIGVPQAILKAYKTALEKPYFIRTDICAFFDNIPRSQALEIITSASKDDDFNTLLTQATTTELSNLITLGRDKELFPLEGKGVAQGSCLSPVLCNLLLDDFDKKMNARGIVCIRYIDDFILFAPSESKAFKAFASASAFLEKLNLSVYDPRHSPDKAEHGVSNKGFEFLGCSV

SEQ ID NO: 8366 - protein, 267 aa, synthetic construct
SSDEIKRDAEEFESRLPDSLVEIQRSLSKQTFTFLQQTGVAQKKPGGKARPLVLAPIPNRVVQRALLDVLQRRVRFVRKVLDTPTSYGGIPTKRVAMAISDARDAMRNGARFHIRSDIPAFFTKINKDRVQDLLRSHINCDATLKLLDLAITTDLANIDDLRRQGLNEIFPIGIEGVAQGSPLSPLLANIYLADFDVAMNADGITCLRYIDDFLLLGESLSNVDRAFNRALKTLDKIGLSAYDPRVDKVKASRGSTDKGFDFLGCNV

SEQ ID NO: 8367 - protein, 245 aa, synthetic construct
GIDGVMLSQLKEYLILNWQDIENQLILGTYEPNIVQVYELLSKKGKVREIYKFTIIDNFIQKAVSLILQDKLDCLLSDNNYSFRKGKGTIDVIRKGLELIEEGYEYIVEIDIKKYFENIDHVLLSKMLFDIIDDKVLISLIMKYQNCLIQKDGKIKRKNKGLITGSSISPVISNLYLMDLDRQYLEYNYIRYCDNIYIFINNKDDGLTLINDISKCLKDKYKLEINQNKTSITHYLSKRMLGYYF

SEQ ID NO: 8368 - protein, 247 aa, synthetic construct
GIDGLYLSELRDDWNINGERYLSLLRKGKYKPGIVQIYEIVNYTGKRRSISSFNSIDRLVLRCLATSLEKYYDSIFSSSSFAFRPGLGVDKAVATFANNLNTGLTRVAIIDIKHYFDSIPIDRLEMILKRIIDDNVLLSLFHNLLYCRISEENVIKTKSKGILQGSPISPFLGNLYLSLLDTQLESMHVSFCRYCDDIAMFFASFEEAKETYTKVYDILKNDLEMDINPQKSGIYEGIKQNYLGYSF

SEQ ID NO: 8369 - protein, 247 aa, synthetic construct
EIDGLHLSELRDYWDINGERYLSMLRAGKYKPGIVQIYEIINYTGKRRSISSFNSVDRLILRCLATSLEKYYNSIFSACSFAFRPGLGVDKAVAAFVSNLNKGLDKVVVIDIKHYFDSIPIDRLEMILKRIIDDKILLSLFHKFLYCRISEENIIKTKNKGILQGSPISPFLGNLYLSLLDTQLESMQIQFCRYCDDITMFFSSFDEAKEAYTKVSNILKNDLEMDIHTQKSGIYEGIKQNYLGYNF

SEQ ID NO: 8370 - protein, 249 aa, synthetic construct
GIDGIFVKDFEEYWILNGQKILKQVMNGVYMVSPVQLREIIMPTGKHRIIAHYTCTDRLITRILAESLQKEVDDSLSEYSYAYRKQRGVIKAVEQAAAYMQAGKIWVLELDIENYFNNINLTLMEEKIREIILDKNLFSLMEQYLRCEVMEEEYTKTYIKDKGLVQGCSLSPVLSNIYLNKLDQQMEKEGLSFCRFGDNINIYFYNKLEAAEWYAKIKAIIENEFDLHLNIRKSGIYLGVNRIFLGYSF

SEQ ID NO: 8371 - protein, 247 aa, synthetic construct
GLDGVKLSELRAYWETNGKKIKESIFNGTYKVGAVEQRQIVNRKGKKRTISLMNSIDRFIFRALYQKMASEWEKQFSQYSYAYQNNKGVLTAVEQAAKYMEEGKDWSVELDIQNFFDNINHSIIISKLKAGIEDVRVLDLLIAYLTCTLLDDHAFHQMEQGVLQGGPLSPLLANVYMNELDHYMEKQGYSFGRFGDDINIYCSTYEEATVAFSDVTARMEKIEQLPLNHGKTGIFKGINRKYLGYRF

SEQ ID NO: 8372 - protein, 242 aa, synthetic construct
GPDTITTDDLKKAGDQFLDKLKNNIVNGNYKQGKTKQYRIPKNDDTFRYIYVLNTTDRLVHKTIADYISPIVDNIISNSAYAYRRGLNTKGAANALNNALKEGYTSGIKADISEFFDSINISALSMMIDSLFPFEPLADFINGILENNTRDGIKGILQGSPLSPLLSNLYLTRFDSDMESKGFFKLIRYADDFVLLLKTASSYEETIKHVEDSLSTLGLKLKPEKTTEITQGKAINFLGYVI

SEQ ID NO: 8373 - protein, 252 aa, synthetic construct
GLDGVSVQSFGDQAASHLEDLRQALQAGNYTPEPHQRIKVPKLDGSGELRPLSLPTIKDKIVQEAVRRIIEPLFEPEFLPCSYAYRPGQGPRRAIGRAIHYLEHDKCRWAVHADFDKFFDTLDHEVLLRRLQEKIKELPVLKLVRMWLRTGSIGAKGTYDDADLGVGQGGILSPLLSNIYVHPLDVYLTDKGHRYIRYADNVLILADSQPRGTEGLNDLIYFSQEMLKLRLNPEAKPLRHVADGFTFLGIHF

SEQ ID NO: 8374 - protein, 252 aa, synthetic construct
GLDGVEIDDQHTDADKMVSALIKELRTGAYVPVPYARGAIPKFDEQNQWRKISLPSVRDKVVQQAFVEALGPVFNKTFLDCSYAYREGKGPVKAIKRVEHILHTHHIRWVTTMDIDNFFDTMDHDIFIGEFTKKVAEPEILQLVRLWLKAGCISARGDWIEPYDGIAQGAVVSPLFSNIYLHPLDCFAIGNNCLYVRYSDNLIVLSETKETLYLWYEQLKSFLEDRLRLRLNEDPYPFKDKERGFVFLGIFF

SEQ ID NO: 8375 - protein, 253 aa, synthetic construct
GLDNVTVESFGNRLDQHISKLQKEIMEHRYVPKPLKSIHVPKYNKENEWRGLALPSVSDKVVQAALLQVVEPLGEKLFMDSSYAYRKGKGHYKAIRRVEHCLGNRKKSWVVHRDIDNFFDTLNYDRLIDQFSALVDGEPVMTELVALWCRTGLVEAGGRWRGVQSGIRQGNIISPLLSNLYLHPLDEFAARLRIDWVRYCDDYLILCDSRKDAISADRLIKEYLKEPLCLKLNNSGLSPCHIDEGFTFLGVSF

SEQ ID NO: 8376 - protein, 253 aa, synthetic construct
GLDGITVEEFGHRLDQHITKLQKDIRERRYIPQPAAVTYIPKFNEENEWRELGLPSVADKVVQAAMLEVVEPLAEKMFLDCSYAYRPGTGHYKAIRRVENSLNNRKKTWVVQRDIDNFFDTVDHNRLMEQFSALVQGEPTMVELVALWCRMGLVEKNGRWRNVQAGIRQGGVISPLLANLYLHPLDVFATKLGVDWIRYADDYVILGESQEEVVSSDVQIVEFLKDSLGLMLNRDESSPKHIDEGFTFLGVRF

SEQ ID NO: 8377 - protein, 249 aa, synthetic construct
GVDGVTISSFNANLEVNLSELSNQILTNQYTPEPLQAAHIPKPGKSEKRQLGLPSLKDKIVQSSLASILSDFYEIHFSNCSYAYRPGKGSVKAIGRVRDFLNRKNYWIASVDIDNFFDSVDHEICTSILKEQISDQSIIRLISLYFSSGMIKFDQWQDTEIGIPQGGAISPVISNIYLNKLDHFLHTLNAFFVRYADDIILFSNTQQSLSETYQKTNEFLNKKLNLKLNALDNPIINVSKGFSFLGIYF

SEQ ID NO: 8378 - protein, 249 aa, synthetic construct
GIDGVSISEFETARDKNLQELSQQILYSQYTPEPLQAVQIPKPGKTEKRQLGLPSLKDKIVQSSLASLLSDFYDPLFSNCSYAYRPQKGSVRAIGRVKDFLNRKNHWAAPVDIDNFFDTVNHETCISILQDKISDIDIIRLIRLYFSSGKIQFDKWQDTIIGIPQGGALSPVLSNVYLNELDQYLHAIQANFVRYADDIILFANTRQFLLDFYEKTRHFLESKLQLKLNQTSHPVMSMEKGFAFLGIYF

SEQ ID NO: 8379 - protein, 243 aa, synthetic construct
RVSLKREIHLPEKEIENLFRALQNSTYIPEPPQKIELKKHDKIRPITIASKKDKIVQALLHEYLTELFDSSFSDKSYAYRPNKGPLKAVNRTFDYIKRGEKYVLKTDIKDFFETIDHSLLICMLKEKIKDDSLIDLIMMYIKIGTVKNLEYEDHNLGVHQGNIISPILSNIYLDRMDKFLERHGFNFVRFADDFVVFAKTHDRIELIHRNLKRFLKVYKLGLNEEKTYITTTDSGFAFLGAYF

SEQ ID NO: 8380 - protein, 248 aa, synthetic construct
GLDNISYIEFKQNFTSQIKELIETILKGTYSPEPLKKIEIQKEDSLEKRPIALSSIKDKLVQRVLYKALNDYFDETFSNKSYAYRKDKSTLNAINRVGQFIQEQNHFILKTDIDNFFESINHDKLLTILDKHIQDKSIIRLISLFLQIGSFKEFDYFEHEDGVHQGDILSPLLSNIYLDLMDKWLEKYDIFFVRYADDFVVFSKKEDELKTIKENLEKFLESLDLKFGIDKTYFTTIQKGFSFLGVYF

SEQ ID NO: 8381 - protein, 244 aa, synthetic construct
GIDNLSELNEHFIHKLKQSCLNQTYVPEPVLQKLIPKSDGENYRKLAISSLKDKLIQKVLANELAWYFDKHFSDKSYAYRPGKSYKNAIFRLRDFLRVKPYFVIKSDIKDCFESINHSKLVALLAKYIKDKRVLNLVEIWIKNGIFNRQTYIKHSKFGIHQGDVLSPLLANIYLNQMDKFLETNNEIFIRYADDFVILADDEKFVQAKINSLKTFLSTIDLSLKDTKTAIYSPTQSFEFLGVSF

SEQ ID NO: 8382 - protein, 245 aa, synthetic construct
GLDELSMDELCTEAFFAELKDEILNLSYSPQPLKRAFIPKENKDEFRKLAIPSLKDKFTQNILIGELSSYFDKGFSNRSYAYRSGKSYSNAIFRARDFCLTHDFVLKTDIKDFFENINHEKLLEILRSNIKDTRIIRLIELWIKNGIFEHFDYTSHTKGVHQGDVLSPLLSNIYLDQMDKFLEHSSIEFVRYADDFVLFFGSREACEQALAGLKDFLVTINLSLNEAKTSLHDKDSEFTFLGVNF

SEQ ID NO: 8383 - protein, 245 aa, synthetic construct
GFDGLSADDICSGEFYAELKSEIFSLSYSPQPLKRAFIPKEAKDELRKLAVPSLKDKFVQNILTRELSGYFDKSFSNRSYAYRNGKSYANAIYRARDFFQIFSFAVKTDIKDFFENIDHEKLLEILRANIRDARIIRLIELWIKNGIFERFDYRAHTKGVHQGDVLSPLLSNIYLNQMDKFLENSGVEFVRYADDFVMFFASYEAAEMRLARLKDFLKTISLSLNEAKTSIHGKDSEFVFLGVSF

SEQ ID NO: 8384 - protein, 245 aa, synthetic construct
GQTIDAFRRDRDRNVTRISDSLKNGTYAPSPLRGVKISKNGGGFRRLGVPTVKDRIVFQGANRLLADVWDPLFAPLSFAYRSGRSIADAIDAVIERIRKGRVWFVKGDIKGCFDELSWDVLSACLHDWLPDESLRRLVNQAIRVPVVEGGQIRPRLRGIPQGSPLSPLLANLYLHSFDLQMLQQGFPVIRYADDWLLLVGSEPEAQAALQTAQGILSVLNIAINEEKSGIGNLRCESVAFLGHRI

SEQ ID NO: 8385 - protein, 221 aa, synthetic construct
LCQVFGVHRSSYRYWKNRPEKPDGRRAVLRSQVLELHGISHGSAGARSIATMATRRGYQMGRWLAGRLMKELGLVSCQQPTHRYKRGGHEHVAMPKWVILYCRRWMEAPMQSCENGELITRTRGTPQGGVISPLLANLFLHYAFDLWMEREYRGVPFERYADDIVVHCSRMSDATRLKNRLSERFSEVGLVLNAGKTNIAYIDTFKRRNVATSFTFLGYDF

SEQ ID NO: 8386 - protein, 248 aa, synthetic construct
GVDGFTVAHFEKKLTDNLTELHHELVTGTWNPEPYLRVEIAKNETEKRKLGLLCIKDKIVQQAIKTAIEPQMDKTFLNISYGYRPGKGAERAIRRTIQELKKLKNGYIAKLDIDNYFDNINQERLFTRLGNWLKDDETLRLIKLCVQTGIVNPQLKWERTTKGIPQGAILSPLLANFYLHPFDQFAISKAPMYIRYADDFLIASPSEKQTKEAVELIKEELADTFYLQLNKPLVCNFHDGVEFLGIIV

SEQ ID NO: 8387 - protein, 248 aa, synthetic construct
GIDGFTLSHFEKRLNDNLIELQHELISQTWNPEPYLRIEITKNETEKRKLGLLCIKDKIVQQAIKTAFEPQLEKTFLNLSYGYRPNKGPERAIKRVVHDLKKLKSGYVAKLDIDNYFDTINHERLFTRLANWLKDDETLRLIRLCIQTGIVTPQLQWQEINKGVPQGAILSPLLANFYLHPFDQFAANKVPMYIRYADDFLIATSTEKQIKEAVELVKEELESQFYLQLNTPIIHNFHDGIEFLGITI

SEQ ID NO: 8388 - protein, 256 aa, synthetic construct
GVDGKKALEPSQRLALYEVLVKNWKQWKHQPLKRVYIPKADGTRRGLGIPTISDRAYQCLIKYALEPAAEAMFNARSYGFRPGRSCHDVQKLLFSNLNGGQANGLSKRILELDIERCFDKIDHKFLMQSVQLPKAAKQGIFWAIKAGVRGEFPSSESGTPQGGVISPLLANIVLHGLENVGHELRYKVRSGGRQIDTIKGFRYADDVVFLLKPEDNPEALRQNIDTFLEARGLKVKEAKTKIVHSTDSFDFLGWNF

SEQ ID NO: 8389 - protein, 236 aa, synthetic construct
GVDGKASLTYKERVELDKLLMEQVNTWTHSKLREIPIPKKDGTKRILKVPTIKDRAWQCIIKYTIEPAHEAIFHERSYGFRPGRSTHDAQKYLFDNLRSQSHGKDKIILEMDIEKCFDRISHNHLMSQIIAPQSVKLGVWKCLKAGVNPEFPEQGTPQGGVCSPLLANIALHGIEAIHKSVRYADDMVFIFKKGDDQAKVFDEITEFLRIRGLNIKTAKTRFVPATTGFNFLGWKF

SEQ ID NO: 8390 - protein, 224 aa, synthetic construct
GCGESRTPRFNREVRRIIPPIDSNQCLAKYALEPAHEATFHEHSYGFRPGRSTHDAQSQIANYLASSKGGINKRILELDIEKCFDRINHSTIMSNLIAPQGLKQGIFRALKAGINPEFPEQGTPQGGVVSPLLANIALNGIEDLHQYHDCNYKKITPSTPERNIKKACVRYADDMVFFLRPEDDAEEILEKISQFLAQRGLKISEKKTKLTASTDGFDFLGWNF

SEQ ID NO: 8391 - protein, 235 aa, synthetic construct
GIDGIKSLNFKQRFALAERLLKAHDWKHSKLREIPIPKKDGTTRMLKVPTMADRAWQCLVKYALEPAHEALFHARSYGFRPGRSTHDAQKILFLNLKSDSNGLNKRILELDIEKCFDRINHTSIMERVIAPQTIKTGIWRCLKAGVNPEFPEQGTPQGGVVSPLLANVALDGIEDIHYSIRYADDMVVILKPKDDADKILKDIQEFLAARGLKVSEKKTKLVRATEGFDFLGWHF

SEQ ID NO: 8392 - protein, 258 aa, synthetic construct
GIDGKKSLTFEERFALEELLKAKSSKWKHQKLRAIPIPKKDGTTTRLLKIPTLADRCWQCLAKYALEPAHEATFHKHSYGFRTGRSAHDAQKQVFQNLKSSSNGINKRILELDIEKCFDRINHSSIISNLIAPNRLKLGIFRCLKVGINPDFPEQGTCQGGVVSPLLANIALNGIEELHKYHTNKGRKIKATTPEKDINTACVRYADDMVFFLRPEDDEKEILDNISQFLAKRGLKVSEKKTKLTASTFGFDFLGWHF

SEQ ID NO: 8393 - protein, 256 aa, synthetic construct
GIDGVKSLDFNGRFELEITLKQSSGNWHHQELREIPIPKKDGTTRMLKIPTIADRCWQCLAKYALEPAHEATFHARSYGFRTGRAAHDAQQFLFSNLSSKAKRISKRVIELDIEKCFDRINHSTIMENLIAPKGIKLGIYRCLKAGINPEFPEQGTPQGGVVSPLLANIALNGIESIHRYHKDNQRITNKTPESDIRYPSVRYADDMVIVLRPQDDANEILAKIEDFLNARGMKVSAKKTKITATTDGFDFLGWHI

SEQ ID NO: 8394 - protein, 256 aa, synthetic construct
GIDGKKSLTFRERFELSELLKASCNNWKHQGLREIPIPKKDGTTRMLKIPTMADRAWQCLAKYALEPAHEATFHARSYGFRSGRSAHDAQTVLLTHLRSNNNGINKRVIELDIEKCFDRISHTSIMENLIAPKGVKLGIFRCLKAGINPEFPEQGTPQGGVVSPLLANIALNGIESIHRYHRNGSKITNKTAGKDITEPSIRYADDMVIIIRPQDDAQKILADIDSFLAARGMKVSEKKTKITAATDGFDFLGWHF

SEQ ID NO: 8395 - protein, 256 aa, synthetic construct
GIDGKTALTFEQRFQLSEKLRTEANNWKHQGLREIPIPKKDGKTRILKVPTIADRAYQCLVKYALEPAHEATFHARSYGFRTGRSAQDAQKYLYTNLNSSVNGIEKRVIELDIEKCFDRINHTAIMDRLIAPYSIRLGIFRCLKAGVNPEFPEQGTPQGGVVSPLLANIALNGIESIHRYHIQGLRITNKTKGYKIVEPSVRYADDMIIILRPEDDAKEILDKISRFLAERGMKVSEKKTKLTATTDGFDFLGWHF

SEQ ID NO: 8396 - protein, 236 aa, synthetic construct
GIDGKASLNHEERFALSEELRTRSSKWKHQKLREIPIPKKDGTTRLLKVPTIGDRAWQCLVKLALEPAHEATFHAKSYGFRTGRAAHDAQKYLFDHLRSTSHGIEKRVIELDIEKCFDRIAHKSIMERLIAPSGIKLGIYRCLKAGVNPEFPEQGTPQGGVVSPLLANIALNGIEDIHQSVRYADDMVFILKPKDDAVAILEQISQFLAERGMKISEKKTKLTATTDGFDFLGWHF

SEQ ID NO: 8397 - protein, 236 aa, synthetic construct
GIDGRASLTFEERLALSEELRAKSNNWKHQKLRSIPIPKKDGSTRLLKIPTIADRAWQCLAKYALEPAHEATFHARSYGFRTGRSAHDAQKFLFLNLSSKAHGISKRVIELDIEKCFDRISHTSIMERLIAPKGIKTGIFRCLKSGVNPGFPEQGTPQGGVVSPLLANIALNGIEEIHRSVRYADDMVIILKPKDDAKAILDKVSEFLAARGMKVSEKKTKLTATTDGFDFLGWHF

SEQ ID NO: 8398 - protein, 259 aa, synthetic construct
GVDGYTASKPNERIKLYQQLVKCNVFRHRPKPAKRTFIPKKNGKLRPLGIPTMRDRVYQNVVKNALEPQWEVKFEPTSYGFRPKRSTHDAISNLFNKLNTNSKKKWVFEGDFLGCFDHLNHNWIMEQTSMFPGNTLIKRWLNMGYIEQDMLHTTTEGTPQGGIVSPLLANIALCGMEEEIGIVYKKTYKSNGGYKIDPKKIGRVLYADDFVIVTETKEQAESMYQNLTPYLRKRGITLSKEKTRVTHIEDGFDFLGFSL

SEQ ID NO: 8399 - protein, 257 aa, synthetic construct
GIDGYISNTPQERVELFNKLSRYSVRNIKVKPARRTYIPKKNGKLRPLGIPVIVDRVYQNAFKNALEPQWEAKFEMTSYGFRPKRSTHDAMSDLFTKLSKGSAKGWIFEGDFEGCFDNLNHDYIMGCINNFPNKSIIRDWLESGYVDNDVFNETTKGTPQGGIISPLLANVALHGMEKEIGVRYIHTTRQGDTLYSNSVGVVRYADDFVIVCPTEEEAYGMYDKLEPYLNKRGLNLAKDKTRVVHISKGFDFLGFNF

SEQ ID NO: 8400 - protein, 257 aa, synthetic construct
GIDGITTNTPEDRVKLFHLLKGYSVRNIKAFPVKRAYIPKKNGKKRPLGIPVIKDRIFQNMVKNALEPQWECRFESMSYGFRPKRSAHDAMANLFLKLSRGTNRAWIFEGDFQGCFDNLNHEHILSCIEGFPYSNAINQWLNAGCIDNKTFYKTETGTPQGGIISPLLANIALHGMEKELGVRYHFPKRDGAMLYPDSIGIVRYADDFVIVCNSKEEAESMYAKLQPYLDKRGLKLAEEKTRVVHITDGFDFLGFNF

SEQ ID NO: 8401 - protein, 267 aa, synthetic construct
GVDGKKSLRPNQRLKLVNELRLKGYKAKALRRVWIPKPGRDEKRGLGIPTMKDRAMQALVKSALEPYWEAQFEGTSYGFRPGRSAQDAISRIFLAIKTNAKYVLDADIAKCFDKINHDYLLSKVDCPHNIKRIIKQWLECGVMDKGIFEETDSGTPQGGVISPLLANIALHGMIIDIENHFPRTKRREDGSLKQGYKPKIIRYADDFVILHTDYDVILQCKNLVAQWLEKVGLELKPEKTSIRHTLKSIVHNGKTIEPGFDFLGFNI

SEQ ID NO: 8402 - protein, 259 aa, synthetic construct
GIDGIKNLPSMQRFNLVDLLKRHRFKASPTRRVWIPKPGKDEKRPLGISTMYDRALQALVKLGRSPEWEAHFEPNSYGLRPGRSTHDAIAAIYVSINKKPKYVLDADISKCFDRINHDALLRKIGRTPYRRLIKQWLKSGVFDNKQFSDTLEGTPQGGVISTLLVNIALHGMEKCLEKYAETLPGKKRDNKQALSLIRYADDFVILHEDIKVVMQAKTVIQEWLNQVGLELKPEKTKIAHTLEEYEGNKPEFDFLGFNI

SEQ ID NO: 8403 - protein, 262 aa, synthetic construct
GIDGVKSLKPSARLTLVMNMKLNHKVKATRRVWIPKPGNVEKRPLGIPTMQDRATQSLVKLALEPEWEAKFEPNSYGFRPGRNAHDAREAIFNSIRYSNKWVLDADISKCFDKINHEKLLTKINTFPTMRRQIKAWLKAGVLDNGHFSETTEGTPQGGVISPLLANIALHGLEKLVKEFAASQRGGKVKNQNSISLIRYADDFVILAPNKTQIIVLKEIVKTWLAEMGLELNPNKTRIVSTFKSSEIFASQEVGFNFLGFNV

SEQ ID NO: 8404 - protein, 261 aa, synthetic construct
GVDGRKNLSPKARLILVQSMKLGDKASPTRRVWIPKPGSSGEKRPLSIPTLYDRALQSLVKLALEPEWEARFEPNSFGFRPGRNAHDAMKAIFNTIKFKPKYVLDADIAKCFDKIDHNVLLSKLNTFPTISRQIRAWLKAGVIDFSEYALHTTSMGVPQGGTISPLLANIALHGMENRIKQVALTLPGCKSENRQAISLIRFADDFVILHKDLAVIQRCQQIISEWLSELGLELKPSKTRISHTLNMYEGKVGFDFLGFTV

SEQ ID NO: 8405 - protein, 247 aa, synthetic construct
GVDGVKSLTPKARLALTKNLRISEKAKPMRRVWIAKPGTQEKRPLGIPTMTDRARQALLTLALEPEWEARFEPNSYGFRPGRSCHDALQAIYNAIRQQSKFVLDADIAKCFDRIDQQALLKKMNTSSAIRRQIRAWLKAGVMEGSELFPTPTGTPQGGVISPLLANIALHGMEERVKQVSKMAQLIRYADDFVCIHTDQQIVQSCQTVLEEWLAGMGLELKPSKTRIAHTLLLEEGQPGFDFLGFTV

SEQ ID NO: 8406 - protein, 156 aa, synthetic construct
QRCFLSLAKRSSAEWILEGDIRACFDAFDHDWLIEHTPTDQGRLRAWLKSGFMEQRRIFPTERGTAQGGIISPTVANMVLDGLEGRIRARFKRRGKVNLIRFADDFVITGESRAILENDVTPLVTEFLHERGLVLAPEKTRIVHIDDGFDFLGFRF

SEQ ID NO: 8407 - protein, 195 aa, synthetic construct
IDRTQQALHLLALDPISETIADPNSYGFRPNRSTADAIAQCFKCLCQKRSARWVLEEDLKACFDKIGYQWLIENIQIDKRMLKQWLGSDFIDKGLFYRTAEGTPQGGIISPTLMLLTLAGLEKRVKEVARKTDDRINSIEYADNFVMTGASEDVLLNEVKPQLIDFLRERGLTLSEEKTHITHINDGFDFLGFNL

SEQ ID NO: 8408 - protein, 245 aa, synthetic construct
GIDGIIWNSDARCMTAVNQLSRKGYHAKPLRRIYIPKKNGKLRPLGIPCMIDRAQQALHLLALEPISETVADLNSYGFRPNRSAADAIAQCFKCLCMKRSSQWVLEGDIKACFDKIGHQWLIDNIQLDKRMLKQWLGCGYVDKGLFYKTAEGTPQGGIIPPTLMLLTLAGLEQLVKSIACKTGNSVNFIGYADDFIITGSSKEVLVNEIKPQLIGFLQERGLTLSDDKTHITHIDDGFDFLGFNI

SEQ ID NO: 8409 - protein, 245 aa, synthetic construct
GIDGIIWNTDARRMKAVNQLSRKAYIAKPLKRIYIPKKNGKLRPLGIPCMIDRAQQALHLLALEPVSETLADPNSYGFRPNRSTADAVDQCFKCLAQKKSAQWVLEGDIKACFDKIGHQWLLDNITVDKRMLEQWLKSGFMDKGLFYRTDEGTPQGGVISPSLMLMTLAGLEQHIKSTALKKGTRANFIGYADDFVVTCASKEVLENDIKPLITDFLAERGLTLSEEKTHITHINDGFDFLGFNH

SEQ ID NO: 8410 - protein, 245 aa, synthetic construct
GIDGVIWNTDARRIAAVKQLKRKAYQAKPLKRIYIPKKNGKLRPLGIPCMIDRAQQALHLLALEPISETVADPNSYGFRPHRSTADAIAQCFLCLSQRYSSEWVLEGDIKACFDKIGHQWLIDNIALDKKMLRQWLECGFMDKGLFYRTDEGTPQGGIISPTLMLLTLSGLEQLLKATARRKGCNVNFIGYADDFVVTGSSKEVLVNEIKPLIARFLAERGLTLSEEKTHVTHINDGFDFLGFNL

SEQ ID NO: 8411 - protein, 248 aa, synthetic construct
GIDGEKWLSSASKMKAVLSLTGKRYKAKPLKRVFINKPGKTKKRPLGIPTMYDRAIQSLYSLALEPVAEIKSDLRSFGFRKHRSTKDACQQIFLCLSKKTSAQWILEGDIRGCFDNINHQWLLTNIPIDKAILTQFLKAGFIYKRHLNPTKAGTPQGGIISPILANMTLDGIEKMLLVKYPKKGKNSKKVNFIRYADDFIVTANSKETAGEIKDEVVAFLKERGLELSDDKTFITNINEGFDFLGWNF

SEQ ID NO: 8412 - protein, 256 aa, synthetic construct
GVDKELWSTTASKMQAVLSLTDKNYKAKPLRRVYIEKKGKKAKRPLGIPCMYDRAMQALYALALDPVSEVTADTKSFGFRKNRCCQDACEYIFTALSRENCAKWILEGDIKACFDYISHEWLIENIPMDKSVLKQFLKAGFVFENELFPTDDGTPQGGVISPILANMALDGMQKALSDRFHTNKLGRVDNRFQIANKVYLVRYADDFIVTAATKEIAEEAKELIREFLQTRGLELSEEKTKITHINDGFDMLGWTF

SEQ ID NO: 8413 - protein, 256 aa, synthetic construct
GIDGELWTTPAQKMEALLSLTDKGYKASPLRRVYIDKKGKKKKRPLGIPTMYDRAMQALYALALEPIAETTADTKSFGFRKGRSCQDACEYIFTALSRKASPQWILKGDIKGCFDNISHDWLLENIPMDKSILKQFLKAGFVFKGELFPTEDGTPQGGIISSILANMALDGLQQVLSDRFHTNRLGRIDFRFKNSHKVNLVRYADDFIVTAATQEIALEAKELIREFLIGRGLELSEEKTLVTHINDGFDLLGWNF

SEQ ID NO: 8414 - protein, 253 aa, synthetic construct
GVDGQLWTNPPRKRQAIDELRSRGYRPQPLKRIYIPKRNGKQRPLSIPTMKDRAMQALHLMALQPVSETTADPCSFGFRPARQVADAVERCFGLLSRQDSPQWVLEADIEACFDRIDHDWLLQHIPMEKTILGQWLKAGYIEKGNWWPTTEGTPQGGIISPVLANMALDGLAKELAAHFAKSYKRPDRGFNPKVRLVRYADDFIITGISRQQLEEQVKPVVCNFLSKRGLRLSESKTRQTAITEGFDFLGFTF

SEQ ID NO: 8415 - protein, 250 aa, synthetic construct
GVDGKIWSTPVAKSTGAQALQHRGYRPQPLRRIYIPKSNGKKRPLGIPTMRDRAMQALWKLALEPVAETRADPNSYGFRPQRSTADAIAHCFNALAKRGSAHWVLEADIRGCFDNISHDWLLTNVPMDKVVLRKWLRAGYVDQGALFATEAGTPQGGIISPVLANWTLDGLEDVVHASVASTARKRKPFKIHVVRYADDFIITGATKAVLQHQVRPAIEAFLKERGLELSDEKTQITHISQGFDFLGQNV

SEQ ID NO: 8416 - protein, 250 aa, synthetic construct
GVDGKIWATPAAKSSGMESMRHRSYRALPLRRIYIPKSNGQKRPLGIPRMLCRSMQALWKLALEPVSESLADPNSYGFRPNRSTADAIEYCFITLAKRTSPVWVLEGDIRGCFDNFNHEWMLKNIPMDKTILRRWLQAGFIDEGTLFATQAGTPQGGIISPVIANMALDGLEAAVHASVGPTKRARERSKINVVRYADDFVVTGISKEILEHSVLPAVRQFMAIRGLELSEEKTKITHIAEGFDFLGQNV

SEQ ID NO: 8417 - protein, 252 aa, synthetic construct
GVDKVVWDTPEKKLCAMGDLKRRGYRPKPLKRVHIPKANGKLRPLGIPTMKDRAMQALYLLGLLPVSETTADGCSYGFRPERSVADAIERCFNALGRRDAAAWVLEADIKGCFDHISHDWLLGNVPMDKRVLATWLKCGFMEKAVWFATEAGTPQGGIISPTLANFALDGLEQLLSKTFYRTMRHGKMVHPKVHLIRYADDFVITGSSEELLVNEVKPLVERFLAERGLMLSAEKTKVTHIDEGFDFLGQNV

SEQ ID NO: 8418 - protein, 252 aa, synthetic construct
GVDRVTWSTPETKSEAVLSLRRHGYRPRPLRRIYIPKANGKKRPLGIPTMRDRAMQALYLLALEPIAETTGDKDSYGFRPGRSVADAIRQCHTVLAWKRSAEWVLEADIEGCFDNISHDWLAENIPMDKAILKSWLKAGYVESGSLFPTEAGTPQGGIISPVLANMALDGLQEVLGKSFFRTRRQNKHYDPKVNFVRYADDFIVTGYSRELLEIEVLPLVEKFLAARGLNISKAKTRVTHISEGFDFLGKNI

SEQ ID NO: 8419 - protein, 248 aa, synthetic construct
GVDGKTWSKPGSKMKAIYTLKRRGYKPLPLRRIYIPKSNGKKRPLGIPTMKDRAMQALYLMALEPVAETTADPNSFGFRPCRSTADAIEQCFTTLHRADRAQWILEADIRSCFDEISHEWLIANIPTDTAILKRWLKAGYIDLGKLYPTSAGTPQGGIISPTLANMVLDGLQPLLKKTFYRGGLNPEKINIIRYADDFVITGISHDTLSEKVLPLLENFLAERGLTLSPEKTRITHISDGFDFLGMNI

SEQ ID NO: 8420 - protein, 242 aa, synthetic construct
GVDGITWSTQEQKTQAIKSLRRRGYKPQPLRRVYIPKANGKQRPLGIPTMKDRAMQALYALALEPVAETTADRNSYGFRRGRCTADAAGQCFLALARAKSAEHVLDADISGCFDNISHEWLLANTPLDKGILRKWLKSGFVWKQQLFPTHAGTPQGGVISPVLANITLDGMEELLAKHLRGQKVNLIRYADDFVVTGKDEETLEKARNLIQEFLKERGLTLSPEKTKIVHIEEGFDFLGWNI

SEQ ID NO: 8421 - protein, 251 aa, synthetic construct
GVDGETWSTPESKWKAIFRLQRTGYRPRPLRRVYIPKANGQRRPLGIPTMLDRAMQALYLLALEPVSETTADRNSYGFRPHRSTADAIEQLFVNLGRKHSAQWVMEGDIKGCFDNISHDWLIANVPLDKAVLRKWLKAGYLESGQLNPTGAGTPQGGIISPVLANLALDGLEKALESRFGQRNTKASYKTKVNYVRYADDFVITGISKELLVNEVKPVVAAFMAERGLSLAAEKSLFTHVSEGFDFLGQNV

SEQ ID NO: 8422 - protein, 252 aa, synthetic construct
GVDGQTWSSPEVKFLAINLLKRRGYKPQPLKRVYIPKSNGKSRPLGIPTMKDRAMQALYLLALEPVAEVTADQRSFGFRTGRSTADAIAQCFCVLAQKTSAEWVLEGDIRGCFDNISHQWLIDNTSTDRQILTKWLKAGYREKGQLFPVNSGTPQGGIISPVLANIALDGLEALLASEFKKRTVKGRLVNPKVNYVRYADDFIITGESKELLESQVLPVVRRFMAERGLMLSPEKTKITHIEEGFDFLGQNI

SEQ ID NO: 8423 - protein, 253 aa, synthetic construct
GVDGITWSTPEAKSQAMLSIKRRGYRPQPLKRVYIPKTNGKMRPLGIPTMKDRAMQALYLLALEPVAETTADGRSFGFRPERSTADAIEQCFTTLSKKVAPQWILEGDIKGCFDNISHDWLMGHVPTDREILRKWLKAGYMEDRQLFPTEAGTPQGGIISPTLANLVLDGLEAKLDAAFGRKRYANGVQTRLMVNYVRYADDFIVTGRSKELLEQEVMPIIKDFMQERGLTLSPEKTKITHIDDGFDFLGQNV

SEQ ID NO: 8424 - protein, 252 aa, synthetic construct
GIDGITKEDYGKKLKANLLSLLTRIRKGQYQAKPARIVKIPKEDGGKRPLVISCFEDKIIESTVSKILNSVFEPIFLKYSYGFHPKLNAHDALRELNRLTYNFNKGAIVEIDITKCFNTIKHCELMEFLRKRISDKKFLRLVMKLIETPIIENDTIVTNKEGCRQGSIVSPILANVFLHYVIDSWFAKISEENLIGQTGMVRYCDDMVFVFESEADAKRFYDVLPKRLNKYGLNINEAKSQMIKSGRDHAAN

SEQ ID NO: 8425 - protein, 270 aa, synthetic construct
GIDGVTKEVYGKKLEDNLQDLLARIRRHAYTPQASRLVEIPKEDGSTRPLAISCFEDKIVQMAVTKLLTAIYEPLFLPCSYGYREGKNGHEALRALMKYSNEFRKGATLEIDLRKYFNTIPHGKLLEILEKKITDRRFLKLIRKLIRSPVVANGKAELNELGCPQGSIISPILSNIYLHSVVDSWFDEISKSHLIGKTAMVRFADDMVFLFQRSEDAEKFYKVLPKRLEKYGLQLHVDKSSLLKSGSKEAEEADTRGERLQTYKFLGFTC

SEQ ID NO: 8426 - protein, 270 aa, synthetic construct
GIDRMTKAAYGEHLDGNIHNLILRIRRGTYRPKAARITQIPKEDGSKRPLAISCTEDKLVQLAVSDILSRIYEPLFLPCSYGFRPGLNCHAALKALQQQTYRNWNGAVVEIDIRKYFNTIPHIELMSLLRKKISDRRFLRLIEVLITAPVIEGKQVSENVRGCPQGSILSPVLANIYLHQVIDEWFDEISRSHIHGRAEMVRYADDRVFTFEFMSEAERFYKVLPKRLNKYGLELHDDKSQRIPAGHIAALRASQSGRRLPTFNFLGFTC

SEQ ID NO: 8427 - protein, 270 aa, synthetic construct
GVDGVTKAEYQENLETNLQNLHLKLRQMSYRPQPVRQVEIPKEDGSMRPLGISCTEDKVVQEMTRRILEAIYEPVFIDTSYGFRPKRSCHDALRQLNREVMRKPVNWVADIDLAKFFDTMPHQEILSVLSIRIKDGNLLRLIARMLKAGIQTPGGVVYDELGSPQGSIVSPVIANIFLDYVLDQWFTNVVRHHCRGYCAIIRYADDVAAVFEHEEDAIRFMRVLPRRLEKYGLRLNTKKTHLLAFGKRNARRCFQTGQRPSTFDFLGLTH

SEQ ID NO: 8428 - protein, 270 aa, synthetic construct
GIDRQTAKDYEANLEVNLKSLLERIKSGRYKAPPVRRTYIPKADGSQRPLGIPTFEDKVAQRAIVLLLEPIYEQDFRPFSFGFRPGRSAHQALRELRSSILERNGRWVLDVDLRRYFDTIEHGKLREVLARRVADGVVRRMIDKWLKAGVLEEGPLLRLEQGTPQGGVISPLLANVYLHYVLDEWYEREVVPRMKGKCSLIRYADDLVMVFEDFLDCRRVLEVLGKRLAKYGLTLHPGKTRMVDFRFKRPGGGQHPATQATTFDFLGFTH

SEQ ID NO: 8429 - protein, 252 aa, synthetic construct
GIDGRTADDYEKDLEANLESLRIRMMSGSYRAPPVRRHYIPKADGSRRPLGIPTIEDKVAQRAIVMLLEPIYEEDFLDCSFGFRPERSAHDAIRTLRDGIMDTGQRWVIDADISKYFDSIDHGHLRSFLDLRIRDGVIRRMIDKWLNAGVLDQGTSSRSVAGTPQGGVISPLLANILLLHVLDRWFVEVVKPRLKRRCQMVRYADDFVMSFEDHLDGRRMLAVLGKRFERYGLRLHPDKTRYVDFRFRRPHG

SEQ ID NO: 8430 - protein, 266 aa, synthetic construct
GVDEETWIDYHKQRETRIPQLLAAFKSGNYRAPNIRRVYIPKDKGKLRPLGLPTVEDKVLQTAVTRVLRPVYEDIFYHSSYGFRPGKSQHQALEELTRQVSLEGKRYIIDADMQNYFGSINHQCLRDLLDLRIKDGVIRKMIDKWLKAGILDNGQLVYPTEGTPQGGSISPLISNVYLHYVLDEWFYQQIRPLLKGDSFLIRFADDFLLGFTNKEDALRVMHVLPKRLGKYGLMLHPEKTKLIDLTTKKGGPDQEKNTFDFLGFCH

SEQ ID NO: 8431 - protein, 267 aa, synthetic construct
GVDGITKEQYGQDLEHNVRDLHARMKSMRYRHQPIRRVHIPKERGKTRPIGISCTEDKIVQAAVREMLEVIYEPVFRDVSYGFRPGRSAHDALRALNRMLLGGVEWILEADIESFFDSIDRTKLMEMLQARVADKSLLRLVGKCLHVGVLDGAEFYAPEDGTVQGSVLSPLLGNVYLHHVLDLWIEREVQPRLVGKATLIRYADDFIIGFEREDDAKRVTEVLPRRFERYGLKLHPDKTRLLPFGRPDNGQPGGKGPATFDFLGFTH

SEQ ID NO: 8432 - protein, 259 aa, synthetic construct
GTDGKSWKTYEAQLEERLPKLHEEIHTGSYRAQPVKRVYIPKTDGQKRPLGITAIEDKLVQQAVVTVLNQIYETEFYGFSYGYRPGRAPENALDALATAILKRPINWILDADLQKFFDSIPHDKLMALISIRVGDKRILRLIGKWLKTGYIEDGKRYRQTEGTPQGSVISPLLANIYLHYVVDEWVEQERRRRNNGEVIIIRYADDLVLGFQYKTEAERYLEALSERVQTYGLKLHPEKTSLKEFGRYAEERRRKRGEE

SEQ ID NO: 8433 - protein, 261 aa, synthetic construct
YGEELDARLLDLQDRILRGSYHPQPVRRVHIPKGSGTRPLGIPALEDKIVQQAVRRGLELIYESMFLGFSYGFRPRRSTHDALDALAVAIGKRKVNWIVDADIRAFYDTIAHAWMQRFIEHRIGDRRLVRLLMKWLHAGVMEDGVLHEVDEGTPQGGIISPLMANIYLHYVLDLWAHAWRKRHARGEVYIVRYADDVVMGFEDGRDARSMRAALSKRLASFGLELHPDKTRVLFFGRYAYEKCERRGLRKPATFDFLGFTH

SEQ ID NO: 8434 - protein, 271 aa, synthetic construct
GVDGVTWQSYEVGLGSNLRDLHRRVHTGSYRALPVLRRYIPKADAGLRPLGVAALEDKLVQSVMVEVLNAIYEEDFLGFSYGFRPGRNQHDALDALAAAIQWRPVNWILDADIRSFFDTVNRQWLIRFVKHRVADPRVIRLIGKWLDAGVLDNGRLMSVQAGTPQGSVICPLLANIYLHYVFDLWIERWRRQRARGTVVVSRYADDTVVGCQHEADALRLMKELRQRMEEFDLTLHPEKTRVLEFGRYAAERRRRKGMGKPQTFAYLGFTH

SEQ ID NO: 8435 - protein, 271 aa, synthetic construct
GVDEMTWRKYKEGSPGRIADLNERVHTGSYRAKPVRRSYINKSDGRKRPLGVTALEDKIVQQAVSTILNQIYETDFMGFSYGFREKRSQHNALDALYIGISRRKINYILDADISGFFDKINHDWLLKFLEHRVADRKILRLIKKWLKVGVIEDGKRTSLEVGTPQGSVISPVLANVYLHYAQDLWAHQWRKRHADGDVIIVRYADDSVVGFQYRKDADRFLKDLIERMGQFGLELHPVKTRLIEFGRFAVVNRRKRGERKPETFDFLGFTH

SEQ ID NO: 8436 - protein, 271 aa, synthetic construct
GVDGMSWREYEEDLHQRVGKLHARLHRGAYRATPSRRVYIPKADGRQRPLGIASLEDKIVQQAVVTVLNAIYEEDFQGFSYGFRPGRSQHDALDALTVALKSQKVNWILDADITSFFDEIDHEWMLMFLGHRIADRRMLGLICKWLQAGVMEDGRRLAATKGTPQGAVISPLLANIYLHYVLDLWARQWRQRHARGEMIVVRYADDSVVGFRTQWQAQRFLVQLQERMARFGLSLNASKTRLIEFGRFAVQNRRRQGLGKPETFDFLGFTH

SEQ ID NO: 8437 - protein, 271 aa, synthetic construct
GVDGMTWQDYEEDLEPRLADLHKRVQRGTYRPQPSRRTYIPKADGKQRPLAIAALEDKIVQGATVIVLNAIYEGDFCGFSYGFRPGRGPHDALDALCTAIETRQVNWIIDADIQNFFGAVSQPWLVRFLEHRIGDKRIIRLIQKWLKAGILEDGVVTADDRGTGQGPVISPLLGNIYLHYALDLWAKRWRQREVSGGMIIVRYADDVVVGFEREDDARRFLDAMRARLEEFELTLHPAKTRLIEFGRHAAAQRKQRGLGKPETFAFMGFTF

SEQ ID NO: 8438 - protein, 271 aa, synthetic construct
GVDGVTWHDYEQDLDRNLEDLHGRLRRQAYRALPSRRRYIPKADGKQRPLGIAALEDKIVQRALVAVLNAVYEMDFLGFSYGFRPQRSQHDALDALATGIARTSVSWILDADISRFFDTVDHDWLIRFVEHRIGDQRVIRLIRKWLKAGAMEDGVIEPTDEGTPQGSVISPLLANIYLHYVFDLWANQWRKRHAEGNVVIVRYADDVVVGFDKPHDAKRFRRAMQQRLEQFGLSVHPEKTRLIEFGRFAARNRASRGLGKPETFNFLGFTH

SEQ ID NO: 8439 - protein, 271 aa, synthetic construct
GVDGIRWMDYAGNMKNNITDLHRRLHQGSYRAQPGRRHYIPKADGKQRPLGIASLEDKIVQYALVKILNAVYENDFMGFSYGFRPGRSQHDALDALATGLVRTNVNWVLDADISQFFDRVSHEWLIRFTEHRIGDRRVIRLIRKWLTAGTSEEGQWRATEEGTPQGAVISPLLANIYLHYVFDLWAHQWRRRYATGNVVMVRYADDIVIGFDKRYDARRFRIAMQRRLREFGLTVHPEKTRLMEFGRFAAENRAIRGKGKPETFNFLGFTH

SEQ ID NO: 8440 - protein, 271 aa, synthetic construct
GVDGITWKDYGEGLEENLADLHRRIHTGAYRAQPSRRKYIPKANGQQRPLGIAALEDKIVQRAVVAILTPIYEAEFLGFSYGFRPGRSQHDALDALAYGIKVKKIGWVLDADISRFFDTISHEWMIRFLEHRIGDKRIVRLIIKWLKAGVLEDSVRIEAEEGTPQGAVISPLLANIYLHYAYDLWAKQWREKHCKGDMIVVRFADDSVAGFQNKEDGERFLADLKERLAKFALTLHPEKTRLIEFGRYAAKNRQRRGQGRPETFDFLGFTH

SEQ ID NO: 8441 - protein, 271 aa, synthetic construct
GVDGVTWEQYAGNLEANVRDLHTRLHRGAYRARPSRRAYIPKADGRQRPLGIAALEDKLVQRAVVEVLNAVYETDFLGFSYGFRPGRSQHQALDALSAGIYLKKVNWVLDADIRGFFDAIDHGWMQKFLEHRIEDTRLLRLVQKWLAAGVMEDGKWTQSKEGTPQGATVSPLLANLYLHYVFDLWSQRWRKRVARGEVIIVRYADDFVVGFQHRSDAERFWRELRERLRSFALELHPEKTRLIEFGLYVAERRRERDQGRPETFNFLGFTH

SEQ ID NO: 8442 - protein, 271 aa, synthetic construct
GVDGVTWTDYGQDLEANLQDLHVRVQSGCYRATPSRRAYIPKADGRLRPLGIASLEDKIVQRAVVEVLGAVYEVDFRGFSYGFRPGRGPHDALDALAVGIWRKRVNWVLDADIRDFFGQIDHSWLRRFLEHRIADKRVLRLIDKWLAAGVVEDGEWTACEEGSPQGASVSPLLANVYLHYVLDLWVDWWRRRHARGDVIVVRWADDFIVGFEYEEDARRFLDELRERFAKFGLELHPDKTRLIEFGRYAARDRKRRGLGKPETFDFLGFTH

SEQ ID NO: 8443 - protein, 272 aa, synthetic construct
GVDEITKKEYERNLEQNIDDLVERLKRKSYKPQPSIRVYIPKSNGKLRPLGIACYEDKIVQLALKKILEAIYEPRFLNCMYGFRPNRGCHNAIKELYKRLNNTKICYIVDADIKGFFDHMKHEWIIKFLKLYIKDPNIIGLVKKYLKVGVMDNGELMVNEEGSAQGNIISPILANIYMHNVLTLWYKFIITKECKGDNFLIAYADDFVAGFQCKWEAENYYKLLKERMEKFGLQLEDSKSRLLQSGAYIARAKQKSGECIRLQTFDFLGFTF

SEQ ID NO: 8444 - protein, 271 aa, synthetic construct
GIDRVTKVEYGANLEENISGLVIRLKNKSYKPLPVLRVFISKGNGKMRPLGIAAYEDKFVQLAIKKILEAIYEPRFLENMYGFRPRRGCHNAIKAAYDRIYENKINYIVDADIKGFFDNMSHEWIMKFLGVYISDPNFLWLINKYLKAGVMTDGTLIDSISGSAQGSIISPVIANVYMHNVLMLWYKFIVLNGIKGKSFLVTYADDFIAGFQYKWEAEKYYIELKRRMAKFNLELEDSKSRLLEFGRFAEGNRKARGEGKPETFDFLGFTF

SEQ ID NO: 8445 - protein, 264 aa, synthetic construct
GIDGITMPAYQQQLVGNITRLSDALKHKRFRANDIKRVFIPKANGKQRPLGLPTVDDKLVQQGVSQILQSIWEADFLPNSYGYRPNKSAHQALHSLALNLQFKGYGYIVEADIKGFFNNLDHNWLMKMLKQRIDDKAMLSLISQWLKARIKSPEGVFEYPKSGTPQGGIISPVLANIYLHYALDLWFEKKVKPRMRGRAMLIRYADDFVCAFQYANDAERFYEVLPKRLKKFNLEVAEEKTSLLRFSRFHPSRKRQFVFLGFAF

SEQ ID NO: 8446 - protein, 264 aa, synthetic construct
GVDKVTAKEFAEELKQNIENLAEHLEKKRYRAKLLRRVDIPKGEGKTRPLGIPAIADKLVQSAAAKILEAIYEQDFLASSYGYRPKVSAHTAIKDLSKELNYGDYSYIVEADIKGFFQNIDHAWLIRMLEQRIDDKAFVGLIKKWLKAGILKQDGEVEHPITGSPQGGIISPILANTYLHYVLDLWFEKIVKPNCEGEAYLCRYCDDFVCAFQYKGDADKFYRSLPKRLEKFGLELAVDKTQIIQFNRWLRKQSSSFEYLGFEF

SEQ ID NO: 8447 - protein, 242 aa, synthetic construct
ERLKTKRYRTKLVRRCYIPKENGQERALGIPALEDKLVQLACAKLLTAIYEQDFLPVSYGYRPGRDAKEAVGDLGFNLQYGRFGHVVEADIQGFFDHLDHDWLLRMLALRIDDRAFLHLIRKWLKAGILDTDGQVLHPDAGTPQGGIVSPILANVYLHYALDLWFERVVRPRCRGQALLIRYADDYVCAFQYREEAEGFYRVLPKRLAKFGLAVAPEKTRILRFSRFHPGLPRRFAFLGFEL

SEQ ID NO: 8448 - protein, 253 aa, synthetic construct
GIDWVTVEAYGENLKERLEGLVDSMKGKQYQPQPVRRVYIPKAGSKEKRGLGIPSTEDKLVQIMLKKILENIYEANFLDSSYGFRPGRNCHQTVNALDKAVMYKPINYIVEVDIKKFYDNIQHKWLMRCLRERITDPNLLWLIKRFLKAGIVEAGYYEATKQGTPQGGIVSPVLANIYLHYVLDLWLEKKFKPRSRGYIQLIRFCDDFVVCCESKVDAEEFLELLKQRLNKFGLEVSENKTRVVKFGKREWQQ

SEQ ID NO: 8449 - protein, 271 aa, synthetic construct
GIDGISKEQYGANLDENIKELSSRLRNMGYRPQPKRRTYIPKPGSVKGRPLAISCFEDKLVELAIKRVLEPIYEVQFEDSSYGYRPGRSQHQCLDDLGRTIQQSRINTIVEADIRSFFNTVDHAWMLKFLGHRIGDPRIIRLIGCLLKGGILEDGLVQASEEGTPQGSILSPLLSNIYLHYVLDLWFSRRVRPQCRGEAYYFRFADDFVAGFQYRQEAEQFQTALGERLGQFKLRLAEEKTRCLAFGRFARSNAQKQGQKPGEFTFLGFTH

SEQ ID NO: 8450 - protein, 270 aa, synthetic construct
GIDGVTVGEYAKALDENIADLVARLKAKQYKPQPVLRVYIPKPNGEKRPLGIPAVEDKIVQMALKKILEAIFEQDFIDTSYGFRPNRSCHDALTELDRIIMNVPVNFVVDMDISKFFDTVDHKRLMECLRQRIVDPTLLQLIGRFLKSGIMEEGKYSEMDQGTPQGGVLSPVLANVYLHYVLDKWFENEVLPQLTGFAQLIRYADDFVVCFEKETEARAFGVALRRRMGKFGLTISEEKSKIIEFGRCTCTRAKRYGRKCETFDFLGFTH

SEQ ID NO: 8451 - protein, 270 aa, synthetic construct
GVDGVTWRKYEENLDENTEDLVTRLIAKQYRPQPVKRAYIPKSNGERRPLGIPALEDKIVQLAIKKILEAIFEEDFCDVSYGFRPNRSCHDALDMVDMIIMTKPVSYVVDMDIAKFFDTVDHECLMECLKQRVVDPSLLRIIARCLKSGVMEEGKYLETDKGTPQGGILSPILANIYLHYALDLWFEKEVKEQLKGFAQLIRYADDFIVCFQHDDEARAFGKTLRERLAKFGLTISEEKSRIIKFGRYACQQARKQSKKCATFDFLGFTL

SEQ ID NO: 8452 - protein, 271 aa, synthetic construct
GIDDVTKQEYSKELDNNIENLIVKLRNHSYKPQAVKRVYIPKGDGKTRPLGIPSYEDKLVQMALNKILQSIYEAEFKDFSYGFRPKRNCHSAIKALNKVIENGRINYVVDADIKGFFNNVNHEWMIKFLEVRIGDPNIISLVKKFLKAGLMDNGIIKTTEIGTPQGSIVSPTLANIYLHYSLDLWFEKVIKRNFRGQSEITRYADDFVCCFQYESEARQFCRLLVSRLNKFNLEVERTKSKLILFGRFAEEIRKSRGFKNAETFDFLGFTH

SEQ ID NO: 8453 - protein, 269 aa, synthetic construct
GVDKVTWEEYDVNVDENVETLIAKMKRFSYRPQPARRVYIPKANGKLRPLGIPCYEDKLVAAVMADILNEVYENIFLDTSYGFRPGRSCHDAIKELNRIIGRCKISYVLEADIKGFFDNVDQKQLMEFIAHDIDDKNFSRYIVRFLKSGIMEEGKYHESDKGTAQGSPLSPILANIYLHYTLDVWFAYLKRNGKFRGEAYIVRYADDFVMLFQYKSDADKMYEALPKRMAKFGLELAMDKTKILPFGRFAKQNSKDGKTETFDFLGFTF

SEQ ID NO: 8454 - protein, 272 aa, synthetic construct
GIDGETKASYGGNLEENLRNLLEQLKEGSYRPTPVRRKFIPKAGSNKLRPLGIPVLEDKLVQNALVIILESIYEQDFLEDSYGFRPGRSQHDALKDLSRKIGTRKVGYIVDADIRGYFDHVDHEWLLKMLQERISDSKILKLIKRFLKAGVMEEGKLSKTEEGVPQGGSLSPLLGNIYLHYVLDLWFNKIITKQCQGEAYLTRFADDTVACFQYQKDAERFYEALKKRLKKFNLEIAEEKTRIIEFGRYAQRDVQRRGGRKPETFDFLGITH

SEQ ID NO: 8455 - protein, 276 aa, synthetic construct
GVDKVTKEEYETNLENNIDNLLIRMKTFKYRPQPVRRVYIDKSGSNKKRPLGIPAYEDKVVQLAINKILKSIYEQDFIDSSFGFRQNRSCHDALKILNVYLSEKNVNYVVDADIKGFFDNVDHKWLMKFLEHRIADKNLLRYIGRFLKTGIMENGKFYKVYEGTPQGGIISPTLANIYLHYVLDIWFNNFIKKKCKGQAYIVRYADDFVCCFQYEDEAKAFYEALKNRLDKFNLQVAEDKTKILYFGKNAYYDRKFKRAKLESYKDRTFDFLGFTH

SEQ ID NO: 8456 - protein, 272 aa, synthetic construct
GIDGITKEQYGDNLEANIQSLLERLKRKAYRPQPVRRVYIPKPGSDKKRPLGIPAYEDKIVQLAASKILNAIYEAEFLDMSFGFRPQRGCHDALKLLNYLIVARKVNYIVDADIKGFFDHVNHDWLMKFLGHRIADPNFLRFIRRFLKAGIMENGELRDATEGTPQGGIVSPILANIYLHYVLDLWFEKAVRKHCRGEAYMVRYADDFICCFQYKHEAEAFYRALKARLAKFSLSVAEEKTKIIPFGRFATQWCKRMGQNKPDTFDFLGFTH

SEQ ID NO: 8457 - protein, 272 aa, synthetic construct
GVDQVTKQAYEENLEANIADLIGRMKRQAYKPQPVRRVYIPKEGSNKRRPLGIPSYEDKLVQKGLARILNTIYEQDFLDCSFGFRPGRGCHDALKVLNHIIERKKVNYIVDADIRGFFDHVDHEWMMKFLELRIADPNLLRLIKRFLKAGVMEAGIVYDTPKGTPQGGIVSPILANIYLHYVLDLWFEKVVKKRCQGEAYLVRYADDFVCCFQNKSDAEWFYANLRERLNKFNLEVAEEKTRIIAFGRFADKESKKQGRKKPDTFDFLGFTH

SEQ ID NO: 8458 - protein, 214 aa, synthetic construct
RRQYIPKKNGKLRPLGIPNIEDRIVQQAIVNVLSPKCEEHIFHKWSCGYRPNLGIKRVMQIILWNIETGYNHIYDCDIKGFFDNIPHKKLMKVLTKYIADGTVLDMIWAWLKAGYMEEGKFHPTDSGTPQGGVISPLLANLYLNELDWTLEEHGVRFVRYADDFLLFAKSKEDIERAAEVAKTTLDELGLEVSIEKTRFVDFDKDDFNFVGFSF

SEQ ID NO: 8459 - protein, 323 aa, synthetic construct
GINNNTMDEMSVGRIINLIQLINSGSYKPRPCRRTHIPKDARKPNGKKRPLGIPTGDDKLIQEVMRMLLEEIYEPVFSDWNYGFRPKRSCHSALKEIRNSWKGTKWVCDVDIKGYFDNIDHDLLLKFLSKRIADNKFLALLKKFLKAGYLDNWRYFGTHSGTPQGGIISPILANVFLHKLDEFMKNRISEFGKGGRRKPNPIYKRALQNRANRIKWIRQGFGASGMPADEQKIQKWRHEADELEKKLRTLSSVIMDDSEFKRMRYVRYADDFLIGVTGSKNEAKKIMKEVVDFVETELHLEISKEKSGIIDPKKGFTFLGYEI

SEQ ID NO: 8460 - protein, 317 aa, synthetic construct
GVDGQTFDGFSPDKVRSIIERLANGTYRPQPARRVYIPKANGQKRPLGVPTTEDKLVQEVVRTILEQIYEPLFSRHSHGFRPKRSCHTALESIRAIWTGVKWLIDVDVVGFFDNIDHDVLVSLLEKRIADRRFVRLIRGLLKAGYVEDWVFHKTYSGTPQGGVVSPMLANIYLHELDMFMQAKMAGFDKGKQRSPSPDARRIRNRLSYVRRTVDQLRAKGRGDDPRVTSFLEEIGRLKAERLAVPASDAFDPNYRRLRYCRYADDFIIGVTGSKSEARQIMEEVRTYLSDHLKLAVSAEKSGIHKASDGARFLGYEV

SEQ ID NO: 8461 - protein, 317 aa, synthetic construct
GIDGKTFEDFGPDRLAPLIASVATGAYKPKPVRRVFIPKGKGKRRPLGIPTRDDRLVQEVARQLLERIYEPVFSKASHGFRPGRSCHTALEHVKAVWTGVKWLVDVDVAGFFENIDHDILLKLLRKRIDDERFIDLIRDMLKAGVMEGRAHTQTYSGTPQGGIVSPILANIYLHELDEFMAGRITAFEKGKTRATNPEYRRLAGRIAKRRERLKRLEASDNADQVTVKAILAEINTLSKQMRSLPSRDAMDAGFRRLRYCRYADDFLIGVIGSKDDARGVFAEVRTFLTEVLALTVSEEKSGIRKASDGTKFLGYEV

SEQ ID NO: 8462 - protein, 318 aa, synthetic construct
GTINNTVDGFSKNRVSKIINNIKNGNYKPTPVKRVYIDKKGSKKKRPLGIPTFDDKLVQLVIKYILEAIYEPNFSENSHGFRKNRGCHTALKQIKKSGSGTKWFIEGDIQGFFDNIDHHILINLLRKRINDETLIGLIWKFLRAGYMEDWQFHKTFSGTPQGGILSPLLANIYLNELDIYMEKYAERFGKGQPKDREVDKRYQYLHLKIKRGRKKADLLREQGKLNESQELIHQVNEWIKERGQRPYYNPMSDKFKSLKYVRYADDFIVMLIGSKDDANAIKSDIAQFLNEELKLTLSEEKTLITHSSKKAKFLGYNV

SEQ ID NO: 8463 - protein, 303 aa, synthetic construct
GSTDETIDGMSMAKIHRIIADLRRETYRWTPVRRVYIPKATGKTRPLGVPTWSDKLVQEVLRSILDAYYDPQMSDHSHGFRPNRGCHTALKAIQRCWTGTRWFIEGDIAQYFDTINHTTLLTILAKRIHDGRFLRLIQTLLQAGYLHDWVYHPTLSGTPQGGVISPLLANIYLHEFDQFVEHTLIPAYTKGQRRKVNPAYAQMEQRISKLRRQREYASVTPLLKELRTLPSRDVHDPDYRRLRYVRYADDFLLGFAGTKVEAEAIKQQINVWLYDHLQLKLSTQKTLITHASSDPAHFLGYDI

SEQ ID NO: 8464 - protein, 302 aa, synthetic construct
GVTEETIDGMSIQKIDMIIEQLRQETYYWRPARREYIPKKNGKHRPLGIPVWSDKLLQEVIRMILEAYYEPQFSEHSHGFRPKRGCHTALQEIQTWQGTHWFIEGDISSYFDTIDHCVLITMLSKQIQDGRFIRLIKNMLEAGYLDDWKFRKTISGTPQGGVISPLLANIYLHQFDKWVGEELIPQYTRGKKQKANSAYNRLSRKIKFYQDKGEYKKAHQIIVERRNIPSVDTYDTNYRRLRYVRYADDFILGFTGSKAEAKDIKKQIGDFLNIKLHLELSQEKTLITHATEESAKFLGYEI

SEQ ID NO: 8465 - protein, 302 aa, synthetic construct
GVDNRTIDGFKYEMIDTLIEKLKTEQYYPKPVRRTYIPKKNGKTRPLGIPCFEDKLLQEVIRQLLESIYEPIFSDNSHGFRPDRSCHTALCQIKNTMRGANWVIEGDITGCFDNIDHTILLNILSQKIEDGRFIELIRRFLKAGYLEFKQMHRSLSGCPQGGIISPILSNIYLNEFDRYMDEIINKNTKGKKRRSNPEYQRLRGKRYTAIKKGNLEEIKRLTKEIQSIPSLDPMDSNFTRVKYVRYADDFVIEVIGSKEMAESIKEDVATFLKEKLNLELNQEKTLITNLGNEKANFLGYEF

SEQ ID NO: 8466 - protein, 315 aa, synthetic construct
GTDKETIDGFSMDWIENIISSLKDESYKPNPSRRVYIPKKDDKQRPLGIPSIKDKIIQEVVKEILVSMYEPIFSKASHGFRPNKSCHSALNDIKMTFGGIKWWIEGDIKGFFDNIDHHVLIGILRKRIKDEKFIKLIWKFLKAGYMEDWKFNKTFSGTPQGGIISPVLANIYLHELDAFMEKQIIKFDEGKRRRDNPVYKKYNTAIWYRKNKLKEKWNTLNDDERKELQSEISTLEKEREKHSAVDNMDASFKRLKYVRYADDFVVGVIGSKEDSKRIKEEITEFLHTSLKLELSQEKTLITSNKNLIKFLGYEI

SEQ ID NO: 8467 - protein, 316 aa, synthetic construct
GVDQRSIDGFSMKEVEDLISVLKSKSYQPYPSRRTYIEKKNGKKRPLGIPSFYDKLVQEVIRMILEAIYDSSFSSSSHGYRKGKGCHSALLEIKRTFTGSKWFIEGDIKGFFDNIEHHTLVTILKRRIKDEAFIELIWKFLRAGYLEEWKFHNTYSGAPQGGIISPIISYIYLNELDTYMKKYQDRFESGKKRQINKEYSNLQYKVRKIQEKIDTAYLNGEVTRITELKEQQKVLKGKLLQTPYNNPMDENYRRLKYVRYADDFLIGVIGSKEDAILIKNEIASFLKEEIKLELSMEKTLITNAFKKHAKFLGFEI

SEQ ID NO: 8468 - protein, 312 aa, synthetic construct
GVDNQTISAMSLERINKIIDSLKDESYSPTPTKRVYIPKKNGKLRPLGIPSIGDKLVQEVCRMLLNSIYDESFEDTSHGFRDNRSCHTALRQIQNRFVRCKWFVEGDIKGFFDNIDHNIMIDILSKRIDDERFLRLIRKFLKSGYMEQNQYHNTYSGMPQGSIISPILSNIYLDKFDKYMQNYKESFDKGNKRKQNKEYKALYDRRKRLENKLSKTTNKTEIDDIKSEIEEINKRYFNIPCLNPMDENFKRIQYVRYADDFIIGIIGSKADAEMVKQDIGQFIKSELNLELSDEKTLVTKSTDRAKFLGFDI

SEQ ID NO: 8469 - protein, 315 aa, synthetic construct
GTDGKTIDGMGMARINALIEKMRNSSYQPNPARRTYIPKSNGKMRPLGIPSFDDKLIQEVVRLILESIYEPTFSDHSHGFRMNKSCHTALKYVQKYFTGTKWFVEGDIKGCFDNVDHHVLIAILRKRIADEQFIGLLWKFLKAGYMEDWNYHNTYSGTPQGSIISPILANIYLNELDHFMAEYAEKFNCGDRRRINPAFKKKLDVCRGKEERLKRNISKMSEEEKEGLLAEISELRRSLRSMPYSDQMDEGYKRVFYIRYADDFLIGVIGRKADAEQVKQDVGHFIRENLHLEMSEEKTLITHGHDFAKFLGYEV

SEQ ID NO: 8470 - protein, 312 aa, synthetic construct
GTDGKTEDEMSIDRINKLIESIKDETYSPNPAKRIYIPKKNGKMRPLGIPSFEDKLVQEAVRMVLEAIYEGHFEWTSHGFRPNRSCHTALKSLQNNFNGAKWFIEGDIKGFFDNIDHDVLIEIMKGRIADDRFLRLIRKFLNAGYMEEWQFNKTYSGTPQGGIISPVLANIYLDKFDKYMNEYANKFNKGTVRSRNKDICKLNSRVHYLKRRINEVEDVNVRTRMVEELHEKQKRILTMPSGNDMDRNFRRLRYLRYADDFLIGVIGTKNECETIKADITKFMQEKLRLEMSQEKTLITNAQDSAKFLGYEI

SEQ ID NO: 8471 - protein, 312 aa, synthetic construct
GTDGQTISGMSIKRIQSIIDKLRDESYQPHPAKRIYIPKKNGKQRPLGIPSFEDKLVQKVIQMILESIYEGSFEKCSHGFRPHRNCHTAMASIMEGFDGTRWFIEGDIKGFFDNIDHDIMITILSERIADERFLRLIRKFLNAGYLEKWKFHKTFSGTPQGGIISPILANIYLDQLDKYVVEYISQFNRGKMRKRNPEYKRIASRKDKRVKKLKTETDEQKRAALRSEIVELHREMQKHPATLDMDEDFRRMRYVRYADDFLIGIIGSKDDCVNIKADIKRFLCEKLKLELSDEKTLITHGHDHAKFLGFEV

SEQ ID NO: 8472 - protein, 312 aa, synthetic construct
GVDELTIDGMSIARIDQLIDSLKDESYQPHPSRRTYIPKKNGKLRPLGIPSFDDKLLQQVIKMILEAIYEGQFEPSSHGFRPNKSCHTALTQIQKTYTGTKWFIEGDIKSFFDNINHDVMIHILRERITDERFLRLIRKFLNAGYVEDWKFYKTYSGTPQGGIISPILANIYLDKFDKYMTDYVKNFCQGKYRKRTPEYRQNEIALGKARRALECVSTENQRQEVIQRIRQLEKERVLIPHSDPMDSSFKRLTYTRYADDFICGVIGSKEDAHRIKADIKDYLEAVLKLELSVEKTLITNARDKAKFLGYHL

SEQ ID NO: 8473 - protein, 312 aa, synthetic construct
GADGKTIDGMSIDRVEQLIGSLKNETYQPNPSKRTYIPKKNGKKRPLGIPSFDDKLVQEVVRMILEAIYEGSFEHTSHGFRPKRSCHTALIDIQKTFTAVKWFIEGDIKGFFDNINHDVLINILRERIADERFLRLIRKFLNAGYVEDWVFHRTYSGTPQGGIISPILANIYLDKFDKYIKEYINRFNKGVTRKGDARYKLYEQRRYRLAKKLKNEKDVKVRKQMTAEIKRLREERNNYPARNEMDSSIKRLKYVRYADDFLIGITGNLEDCKTVKEDIKNYLNEALKLELSDEKTLITNAQKPAKFLGYDV

SEQ ID NO: 8474 - protein, 312 aa, synthetic construct
GSDGKTIDGMSLKRIENLIDALKDESYQPKPARRTYIPKKNGNMRPLGIPSIDDKLVQEVLRMLLEAIYEGSFENTSHGFRPKRSCHTALIQVQKNFTAAKWFIEGDIEGFFDNINHDVLIGILKERIADDRFIRLMWKFLKAGYIEDWTFHRTYSGTPQGGIISPILANIYLDKLDKYMKEYACQFDRGDRRAMNLEYKRYSRKIWWLGTKLKQTKDKDTRKELIDAIKQHQKNRMHLPSVDEMDEGYRRIKYVRYADDFIIGVIGSKSDCEAIKEDIKNFLGEKLKLTLSEEKTLITHGNRKAKFLGYEI

SEQ ID NO: 8475 - protein, 312 aa, synthetic construct
GSDGRSIDEMSLARIETLIASLKDESYQPHPSRRVHIPKKNGKTRPLGIPAFEDKLVQEVVRMILEAIYEGHFETTSHGFRPKRSCHTALLHIQKTFSGAKWFIEGDIKGFFDNIDHDVLVGILRERISDDRFIRLIRKFLKAGYVEDWTFHNTYSGMPQGGIVSPILANIYLDKLDKYVKEYIRHFDMGTKRRPGKESNDLANERKRTVRKLKKVKDGTEKAALVARLKAIEQERAAFPSGDEMDGSYRRLKYIRYADDFILGVIGSKEDALRIKEDIKSFLSESLALELSEEKTLITHTGKSAKFLGYEI

SEQ ID NO: 8476 - protein, 293 aa, synthetic construct
GTDGKTIVEIQKLPIEMVIKTIRNKLNYYQPKNVRRVEIPKDNGKTRPLGIPSIWDRLIQQCVLQVLEPICEAKFHERNNGFRPYRSTQNAIAQCYKMAQIQNLHFVVDVDITGFFDNIDHSKLIRQLWGLGVQDRKLIMIIKQMLKADILFKDIVITPETGTPQGGILSPLLANVVLNELDWWVANQWEMFKIKEGSTGYEFTKVDNEGNILTIDRTQKWNKLRAKTGLKEMYITRYADDFKIFCRDYATAVKVMKATNLWLAENLHLQTSDEKSGITNLRKNYTTFLGIKF

SEQ ID NO: 8477 - protein, 290 aa, synthetic construct
GTDGTIIKDIGKLPAETVVKKVRYIVAGSPHGYRPKPVRRKEIPKPNGKTRPLGIPCMWDRLIQQCIKQVLEPICEAKFSENSYGFRPNRSVENAIKATYNRLQISQLHYVIEFDIKGFFDNVNHSKLIKQIWAMGIRDKHLIFILKRILKAPIKMTNGTITYPEKGTPQGGIISPLLANIVLNELDHWVESQWQENPVTKNYVVHINKSGSPCKSNAYKEMKKTKLKEMYMVRYADDFRVFCRYKESAEKAKIAITQWIEQRLKLEVSQEKTRIVNVRKRYSDFLGFKI

SEQ ID NO: 8478 - protein, 290 aa, synthetic construct
GTDKLKISDIGKLTADEVTARVRRIVKGGKNGYTPRSVRRKEIPKPNGSTRPLGIPCIWDRLVQQCIKQVMEPICEARFSNNSYGFRPNRSVENAIAAIYRLMQRSGLYYVVEFDIKGFFDNVDHSKLIKQLWSLNIRDKELLYVIRRILKAPILMPDGHIEHPAKGTPQGGIISPLLANVVLNELDHWIESQWQCNPVTENYSYRENATGCPIQSHAYRAMRNTRLKEMYIVRYADDFRILCRTKEQADRTLIAVTHWLKERLRLDVSPEKTRVVDTRRSYSEFLGFKI

SEQ ID NO: 8479 - protein, 285 aa, synthetic construct
ACDNVNIKNIEGMEQSYFLNEVKRRFQNYQPQKVRRKEISKPNGQTRPLGIPAMWDRIIQQCILQVMEPICEAHFSNRSYGFRPNRSAEHALADASVRVNKQNLTYVVDVDIKGFFDEVNHVKLMRQLWTLGIRDKQLLVIIRKILKAPVQMPDGTTMFPTKGTPQGGILSPILANVNLNEFDWWISRQWETFKAKKVKPRCMRGIWCNDVVTTQLTKTSKMKPMYIVRYADDFKIFTNTRSNAEKIFKATQMWLEERLKLSISAEKSKVTNLTKQQSEFLGFTL

SEQ ID NO: 8480 - protein, 286 aa, synthetic construct
GIDGKTIKDIEKLTTERYLDIVKKRFKFYKPRKVKRTEIPKPNGKTRPLGIPSIWDRVAQQCILQVLEPICEAKFNPHSHGFRPNRSAEHAIADCAKKMNIIKMGYCVDIDIQGFFDEVWHSKLMRQMWTMGIRDKELLTIIRKMLKAPVVLPNGTIQFPEKGTPQGGILSPLLANINLSEFDWWVSEQWETRHMSEIKTQYNANGTEHMGNHHRKMRSHTKLKEFYIVRYADDFKLFCHNRKTAELLYHASIQWLEQRLHLPVSIEKSKITNLRKESSEFLGFNL

SEQ ID NO: 8481 - protein, 287 aa, synthetic construct
GVDDITIKDIENLEQTIFVEMVRKRFSNYSPRKVRRVEIPKPNGKTRPLGIPSIWDRIAQQCILQVIEPICEAKFNKHSYGFRPNRSTEHAIADMLFRINQQKLHYVVDVDLQGFFDEINHKKLMNQVWTLGIHDKQLLVIIRKMLSAPIVLKNGSIMHPVKGTPQGGILSPLLANISLNEFDWWISNQWETFETRKKYAAAVMGNGTKNRGLTYRMLRKNSKLKEIYIVRYADDFKLITSNRRDAEKIFIASQMWLKERLGLPISKEKSKITNLRKEESEFLGFTI

SEQ ID NO: 8482 - protein, 286 aa, synthetic construct
GIDGVTIKDVEKLSQEDFIKIVQKRFSNYTPRKVRRVEIPKPNGKTRPLGIPSMWDRIAQQCIKQVLEPICEAKFNKHSHGFRPNRSPETAMADATLRVNRSHMQYVVNVDIQGFFDEVNHKKLMRQLWTMGIRDKQLLVIIRKMLKAPIVLPNGEMQYPNKGTPQGGILSPLLANINLNEFDWWITNQWEDRLLKELSLTIKKGGHVDKYPHYSKMRKTTALKEMYIVRYADDFKIFTATKSNAQKIFKACEMWLQERLKLPISKEKSKITNLRKESSEFLGFEI

SEQ ID NO: 8483 - protein, 272 aa, synthetic construct
GVDGITISDIERLNENDFVEIIRANLSNYRPGPVRRVYIPKKNGKKRPLGIPNLYDRIIQQTIKQVIEPIVEAKFFKHSYGFRPLRSVEQAMGRMHSVINNVQLHYVVDVDIKGFFDNVNHNLLRHQIWNMGIRDTKLIAIISKILRAEIVGEGTPVKGTPQGGVLSPLLANIVLNDLDQWIASQWENFPSKHRYSRGKLHRALKGTTLKEGYLVRYADDFKLLTRSYSMAKRWYTAIRGYIEKHLKLEISPEKSGITNLRKKRTEFLGFEI

SEQ ID NO: 8484 - protein, 273 aa, synthetic construct
GTDGKTIDDMKELSENDLVNEVRSKLQNYHPKKVRREWIEKENGKWRPLGIPCILDRVIQQCFKQVLEPIVESQFFKHSYGFRPLRSAHHAMARIQFLINHSQLHYVVDVDIKSFFDNVNHRLLKKQLWNIGIQDRKVLACISKMITSEIDGEGVPDKGSPQGGILSPLLSNVVLNDLDQWVADQWEVFPLTKSYSSDDARRRARKQTNLKQGYLVRYADDFKILCRDGKTAQRWYHAVRLYLKERLKLDISPEKSQIVNLRKRESEFLGFTI

SEQ ID NO: 8485 - protein, 273 aa, synthetic construct
GTDSFTIDNYKEMNQAEFIHLILSQLENYKSKSIKRVMIPKPNGEKRPLGIPCMIDRIIQQMFKQVLEPICEAKFYEHSYGFRPLRSAKHALGRIMYLINISKMHYAVDIDIKGFFDNVNHRLLIKQLWNIGICDKRVLAILSKSLKSPIQGEGISSKGTIQGGIISPLLSNVVLNDLDHWVSKQWHTFETKYPYTKGYNKFRALRDTNLKQGYIVRYADDFKIMTNDYPSALKWFHAVKLYLKDRLKLDISNEKSKIVNLRKRKSEFLGFTI

SEQ ID NO: 8486 - protein, 273 aa, synthetic construct
GIDSFAIDQYKSMDKAEFLNLVRNRLNQYKPKAVKRVFIPKPNGDKRPLGIPTMFDRLIQQMIKQILEPICEAKFYEHSYGFRPLRGARHAISRVMYLISRNTFHYAVEIDIKGFFDNVNHTLLLKQLWNMGIKDKRVLKLIYLILKAPIKGVGIPRKGTPQGGILSPLLSNVVLNDLDQWIARQWHHFQSDYDYTEPGNRSRALKRTKLKQGYIVRYADDFKIMAKDFRTAQKWFMATKLYLKERLKLDISPGKSRIINLRKNKSEFLGYSL

SEQ ID NO: 8487 - protein, 273 aa, synthetic construct
GTNGHTIKHLNKIDADKLIRLTQKRLENYMPHAVRRLFISKPNGKMRPLGIPTIEDRLIQQMFQQVLEPIVEGKFHPQSYGFRPKRGTHDALARCYHMVNHSHQHFVVDIDIKGFFDNVNHKKLMRQLWTIGIRDKKVLSIIKKMLKAEVTGEGIPVKGTPQGGILSPLLANVVLNELDWWVSNQWETKPTRVPYKLKRNKTDALKKTRLKPMYLVRYADDFKIFTNSYDNARKIKIAVEKWLKERLGLEISEEKSKITNLRKNGTDFLGIRF

SEQ ID NO: 8488 - protein, 274 aa, synthetic construct
GTDGLTIKDIAGMTNQEVITMVKRRLKNFTPQSVRRVEILKDNGQNRPLGIPTMSDRLIQACIYQILEPICEARFHNHSYGFRPTRRTEHALATMHRMINIQHLHFVVDVDIKGFFDNVDHGKLLKQMWTMGIQDKNLLCIISAMLKAEIEGIGIPNKGVPQGGLCSPLFSNVVLNELDWWISDQWESYETSYPYKRNEGKIRAIRRGSKLKECYIIRYCDDFKIMCPTRDVAERMFVAVKLWLKERLNLEISSEKSKITNLRKKSSEFLGFKI

SEQ ID NO: 8489 - protein, 273 aa, synthetic construct
GTNKRTIIDVGEENPYQLVQYVQNRFNNFQPHSIRRVEIPKPNGKTRPLGIPTIEDRLVQQCIKQILEPILEAKFHKHSYGFRPERSSHHAIAIFQQWTFKGFHYVVDIDIKGFFDNVNHGKLVKQLWTMKIRDKTFISILSRMLKAEVKGIGKSTKGTPQGGILSPLLANVVLNELDWWIDSQWDGFPTKRKYSSLLSKTQSIRKYSNLKEIKIVRYADDFKIMCKDYHTAQKIFLATKQWLKVRLDLDISPEKSKVTNLRKNYSDFLGFKL

SEQ ID NO: 8490 - protein, 286 aa, synthetic construct
GVDNKNIDDLKSIPDTDFISIVQTKLSEYKPQPVKRVEIPKPNGKTRPLGIPTIWDRIVQQCLLQVLEPIMEAKFHDKNYGFRPNRSAHHAFAQAVRMAQVSKLTFVVDIDIEGFFDNVNHSKLIKQLWSLGVRDKWLLGVIRAMLKAPIIHKDGHIEHPKKGTPQGGILSPLLANVVLNELDWWISSQWETHPTRHNYDWYHAEKEYWNKGNKYRALRGTSLKEIYIVRYADDFKIFCRKRSDADKIFLATKLWLKERLKLDISQEKSKVVNLKKQKSEFLGFTL

SEQ ID NO: 8491 - protein, 286 aa, synthetic construct
GTDTLNIKDIEKLSVEKLVEMMQRKLAWYQPKPVKRVEIPKPNGKTRPLGIPTIVDRLVQQCILQVLEPICEAKFYERSNGFRPNRSAEHAMAQCYRMVQKQNLYFVVDVDIKGFFDNVNHSKLIRQMWAMGIRDKQLICIIKQMLKAPVVMPDGETLYPTKGTPQGGILSPLLANIVLNELDWWISSQWEDMLTHREYYVSVNNNGSLNKSGVFRTLRRSALKEMYIVRYADDFKIFCRKRSDANKIFVAVKKWLKDRLKLEISEEKSKVVNLKKHYSEFLGFQF

SEQ ID NO: 8492 - protein, 286 aa, synthetic construct
GVDGRTIKHLSRLNEEEYISLIQKQFHWYKPRPVKRVEILKPNGKIRPLGIPTIVDRIVQQCILQILEPICEAKFHDSSYGFRPNRSTEHAIAECARLMQIQHLHYVVDIDIQGFFDNVYHAKLIRQLWNLGIQDKKLLCIIKEMLKADIVMPDKEVITPTKGTPQGGILSPLLSNVVLNELDWWVSSQWLTMPTHYPYKQRTNSQGTEIKSHTYRALRTSNLKEIYIVRYADDFKIFCRNYYDAKRTYQAVTKWLQDRLKLNVSEEKSKITNLKQRYSEFLGFKL

SEQ ID NO: 8493 - protein, 286 aa, synthetic construct
GVDKRTIADLAKLSEEEYVRLIRKQFSNYHPGPVRRVEIPKPNGKTRPLGIPTIVDRIVQQCILQVMEPICEAKFSENSNGFRPNRSAETAIAQCMRLIQVQHLYHVVDLDIKGFFDNISHTKLIRQIWALGIRDKKLLCIIKEMLKAPVVLPNGEKTYPARGTPQGGILSPLLANIVLNELDWWIASQWEEMPTKTKFKTRSNAQGTEIKSHAYRALRRSRLKEMHAVRYADDFKIFCATHEDAVRAYKATELWLKDRLGLEISPDKSKVVNLKRQYSDFLGFKL

SEQ ID NO: 8494 - protein, 273 aa, synthetic construct
GTNNKTIKDLEEKSTEELVEYVRNRLEYYVPQSVRRVYIPKPDGRKRPLGIPTIKDRLIQQCIKQVLEPICEAKFHNHSYGFRPNRSTKHAIARIMYLINFSKLHYTVDIDIKSFFDNVDHNKLKKQLWSMGIRDKKLISILGNMLEAKIEGEGVPEKGTPQGGIISPLLSNIVLNEMDWWISNQWETFKTDYKYNRKGDKITAIKKTNLKEIYIIRYADDFKIMCRDFETASKIKIATIKWLKERLNLEVSEKKTSITNLKKNHTEFLGIKL

SEQ ID NO: 8495 - protein, 288 aa, synthetic construct
GTNHKTINDIAGESEDEIIEYVRKRLNKFYPHSVKRIYIPKNNGDKRPLGIPTIEDRLIQRSILQVLEPICEAKFHPHSYGFRPNRSTEHAIARAMTLINMNKLHYVVDVDIKGFFDNVNHGKLLKQLWTLGIKDKKLIKIISLMLKAQIKDGSMITNPVKGTPQGGIISPLLANVVLNELDWWISSQWETFETKHNYSKLRTFKNGTTTIDKSHKYRALRNGKLKEIYIVRYADDFKVFCKNPKDAEKIFIAIKLWLKERLDLETSPEKSKVTNLRKHPTEFLGFEL

SEQ ID NO: 8496 - protein, 283 aa, synthetic construct
GSNDTTILEIAEQNLTTFVAKVQKALENYNPKPIRRVYIPKRNGDKRPLGIPTMEDRIVQQCIKQILEPICEAKFYNHSYGFRPNRNAKHAIVRAMSLMNISKFHYVVDIDIKGFFDNVNHGKLLKQIWSLGIRDKSLLSIISKILKTEIENVGKMEKGTPQGGIISPLLSNIVLNELDWWISSQWETMITRHNYESIDKRNNTIIRSHKYTALRRTSNLKEMFLVRYADDFKIFCKDFNSAQKTLIAVKKWLKNRLGLEVNNEKSKVTNLRRNYTEFLGFKL

SEQ ID NO: 8497 - protein, 274 aa, synthetic construct
GTDGITIEQYKIEDVETFVDEIRATLKNYKPQTVRRVEIPKPNGKTRPLGIPTMRDRLIQQMFKQILEPICEARFYNHSYGFRPNRSTHHAMGRCQFLANIALNQHVVDIDIQGFFDNVSHSKLLKQMYSIGICDKRVLSVVSKMLKAPIKGIGIPTKGTPQGGILSPLLSNIVLNDLDWWISNQWENMKTKFNYKERKNKVLMIKRTTTLKEMYIVRYADDFKIFTKSHKNAIKLYHAVKGYLKNHLNLDISNEKSKITNLRKRASEFLGFSL

SEQ ID NO: 8498 - protein, 272 aa, synthetic construct
GTDGITIDDYKLANIEIFVSYIRSVLSNYKPQKVRRVYIPKSNGKKRPLGIPTMRDRIIQQMFLQILEPICEAQFYNHSYGFRPNRSTKHAMARCKFLTRKNFHYVVDIDIKGFFDNVNHNKLIKQLYTIGIKDKRVLAILAKMLKATIEGEGIPKKGTPQGGILSPLLSNVVLNELDWWIANQWEFLKTKENYHPAARLKSLKRKTTLKEMFIVRYADDFKIFTKDHQSAIRIYHGVKGYLSNHLSLDISPEKSKITNLRKRDSEFLGFSL

SEQ ID NO: 8499 - protein, 273 aa, synthetic construct
GVNTNTIMDIGEENPDELAIYVRERLINYKPQPVRRVEIPKPNGKMRPLGIPTIEDRIIQQCIKQVLEPICEAKFHKDSYGFRPNRSTHHAIARTYSLANINKLTYVVDIDIKGFFDNVNHSKLLKQMWTMGIQDKNLLCVISKMLKAEIKGVGIPNKGTPQGGILSPLLSNIVLNELDWWISNQWQTLKSKFPYKREIFKYQALKRSKLKEVYIVRYADDFKLFCRSYNNAKKIFKAVTMWLKERLGLEINEEKSSIVNLKQKYSEFLGFKF

SEQ ID NO: 8500 - protein, 273 aa, synthetic construct
GTDGMTIDDIKQLSNAEIVATVRESLSNYRPKSVRRVFIPKAGSDKMRPLGIPCIWDRLVQQCILQVLEPICEPKFHNHSYGFRANRSAHHAVSRVTTLINLSKYHYCVDVDIKGFFDNVNHGKLLKQIWTLGIRDKRLICIISKMLKAEIDGEGVPEKGTPQGGLLSPLLSLIVLNELDWWVSSQWETFQPKNRSKNGWLQYAKKYTKLKSGFIVRYADDFKIMCSTYGEAQRFYHSTVDFLNKRLKLEISPEKSKVVNLKKNSSDFLGFKI

SEQ ID NO: 8501 - protein, 275 aa, synthetic construct
GVDNLTIKDIWHLNDTKIIHEVRKRLNNYQPQAVKRVLIPKEGSDKKRPLGIPTIWDRLVQQSILQVLEPICEAKFHNHSYGFRPNRSTHHALSRVVSLINIGHQHYCVDIDIKGFFDNVCHKKLLRQMWTLGIRDKSLLCVISKILKSEIEGEGIPNKGTPQGGIISPLLSNIVLNELDWWISSQWETYKPHRISTRHLGFRQYARKYTNLKCGYVVRYADDFKIMCRTYDEAQRFYHATVDFLKSRLGLEINPKKSKVVNLKKNSSVFLGFKI

SEQ ID NO: 8502 - protein, 275 aa, synthetic construct
GVDGLTIKDVRQLNDFQVINQVRKRLMNYRPSPVRRVYIPKEGSDKKRPLGIPTIWDRLVQQCILQVLEPICEAKFHNHNYGFRPNRSTHHALSRMVSLINVGKHHYCVDIDIKGFFDNVQHGKLLKQMWAIGIRDKRLLSIISNLLKAEIIGEGIPSKGTPQGGILSPLLSNIVLNELDWWISNQWETYKPHRFKDGPNGFTTYARKYTNLKGGYIVRYADDFKIMCRTYEEAQRFYHATVDFLKARLGLEINPEKSKVVHLKKNSSDFLGFKI

SEQ ID NO: 8503 - protein, 275 aa, synthetic construct
GTDGMTINDIKMLSTDEVIEKVKMMFGWYEPQSVRRVFIPKPNGNRRPLGIPTIWDRLFQQCVLQILEPICEAKFHNHSYGFRPNRSTHHALARMKSLVNRKGNGFHYCVDIDIKGFFDNVHHGKLLKQLWTIGIRDKKLLSIISRLLKAEIVNEGVPQKGTPQGGILSPLLSNIVLNELDWWVSNQWETIKTSHPYKGNSDKYRALKKSKLKECFLIRYADDAKILCRDYVTALKMFEATKDFLRTRLHLDISLEKSKIINLRKKASHFLGFTV

SEQ ID NO: 8504 - protein, 285 aa, synthetic construct
GTDGSTIKDINNIDIDEVITKIKTMFDFYTPKSIRRVEIPKANGKTRPLGIPTIWDRLFQQCILQVLEPICEAKFHKHSYGFRPNRSTHHAITRSVYLINITKLYHCVDVDIKGFFDNVNHGKLLKQLWALGVKDKKLLKIISVMLKAPIEGIGIPTKGVPQGGILSPLLSNIVLNELDWWVSNQWETFKTDKDYTKYRTSKTGKIVVDHSIRNKMLKKSKLKEIYIVRYADDFKIFCRTRSQAKAIDIAVGDMLKNRLGLECSAEKSKVLNLKKSYSEFLGFKM

SEQ ID NO: 8505 - protein, 273 aa, synthetic construct
GDDGLTIEDINRLSVSEVVSTIQRMFEYYTPQAVRRVFIPKANGKTRPLGIPTIWDRLFQQCILQVLEPICEAKFYKHSYGFRPNRNTHHAKARFETLINRACLYHCVDVDIKGFFDNVNHAKLIKQLWSLGIRDKALLSIISRLLKAEIIGEGFPKKGTPQGGILSPLLSNIVLNELDWWVSNQWESFETHKLYKSNLGRYNALKQSNLKHCYIVRYADDFKILCRTRSQAIKMYYAVNDFLHTRLRLEISEQKSKVVNLKKNSSEFLGFRS

SEQ ID NO: 8506 - protein, 277 aa, synthetic construct
GTDGKTISDILTLNYDEAINFVKRCFKKYTPNPIRRVHIPKPGKKEKRPLGILTIADRIIQECVRMVIEPILEAQFFQHSYGFRPYRDAKQAIERCVFICNRIGYNWVIEGDIKGFFDNVNHTILIKQLWHMGIRDRRMLMIIKAMLKAGVIKETKINEMGTPQGGIISPLLANVYLHKLDQWITREWEEKKMRNGTTIRTAKYKSLRDHSTITKPEFYVRYADDWVLFTNSRGNAEKWKYRIKKYLKENLKLELSDDKTLITNIKKKPMKFLGFKI

SEQ ID NO: 8507 - protein, 276 aa, synthetic construct
GTDGETIDDILQDGYESVISRVRKCFLAYNPKLLRRVHIDKQVSKDKRPLGIPAIIDRIIQECIRMIIEPILEAQFFSHSYGFRPYRSAEHALSKVTNTAYDTNYCWVVEGDIKKFFDNVNHTILIKKLYSMGIRDRRVLMIIKAMLQCGVLGEAEQTTVGTPQGGIISPLLANAYLDSLDHWITREWENKETKHEYSRLDGKYRALKNASNLKPAHFVRYADDWVLITNSKANAIKWKQRIAKHLKEQLKLELSEEKTLITNIKKKAIKFVGFHF

SEQ ID NO: 8508 - protein, 274 aa, synthetic construct
GVDGKTIQDYLRLSEEKLIELIRGRLTNFKAHLIKRVFIPKANGGQRPLGIPTIEDRIIQQMMKQVLEPVLEAQFFKYSFGFRPERTTYHALERVKVLVHNTGYHWIVEGDIRQFFDKVNHRILIKKLWSMGIKDRRILCLITEFLKAGIFKNIIRNDNGTPQGGILSPLLANVYLHSFDKWVAKQFEEFTTRHEYSKHDHKLRGLKSSNLKPGYLIRYADDWVLVTNNKSHAYRWKTVIKNFLQKELKLELSEEKTRITNIRHKPIEFLGFKY

SEQ ID NO: 8509 - protein, 276 aa, synthetic construct
GVDSLTINDILQADEEKVIHLITNTIRDYTPSMVRRVWIPKAGKKELRPLGIPTILDRIIQQCVKQVIEPICEAQFFPYSFGFRPYRDGHMAIERVGSLIHKTKYHWIVEGDIRKFFDKVNHNILLKNCFKIGIQDKRVLMLIKAMLKAGVMHENTKTTLGTPQGGIISPILANIYLHDFDMWVYNQWQNKKTRKNYANKHSRTTTLKRTTKLKQGYLIRYADDWVIVTNSKTNAIKWKKAVSHYLKDKLKLELSEEKTKITNVRKKNIEFLGFKL

SEQ ID NO: 8510 - protein, 290 aa, synthetic construct
GIDQKIVDDYLLMPTEKVFGMIKAKLNDYKPIPVRRCNKPKGNAKSSKRKGNSPNEEGETRPLGISAVTDRIIQEMLRIVLEPIFEAQFYPHSYGFRPYRSTEHALAWMLKIINGSKLYWVVKGDIESYFDHINHKKLLNIMWNMGVRDKRVLCIVKKMLKAGQVIQGKFYPTAKGIPQGGIISPLLANVYLNSFDWMVGQEYEYHPNNANYREKKNALAALRNKGHHPVFYIRYADDWVILTDTKEYAEKIREQCKQYLACELHLTLSDEKTFIADIREQRVKFLGFCI

SEQ ID NO: 8511 - protein, 277 aa, synthetic construct
GIDNKTIDYYLHLPYEDLVSQVQTCIEDYNPEPVRRKYIPKENSDKLRPLGIPTMIDRIIQEITRLVIEPIAEAKFYKFSYGFRPMRSAEHAMAEILEKARKSKTYWVIEGDIKGYFDNINHNKLITMLWKIGIKDKRVLSIIKKMLKSGIVEEDGEIYPSDLGSPQGGIISPLLANIYLNFFDWMIAEEFDQHHYINNYERRDKGLRAIRRDHKPVYSIRYADDWVVLCSSKKQADTLLIKIRKYLKHQLSLELSEEKTKITNLVEEKASFLGFEF

SEQ ID NO: 8512 - protein, 276 aa, synthetic construct
GIDKKDVNYYLQMEAKQLIKLIRQHIDNYKPNPVRREYINKGNGKKRPLGIPTMIDRIIQEIARIVLEPIAEAKFFNHSYGFRPYRSCHYAIGRVLNTISRSKTYIAIEGDIKSFFDHINHNKLVEMMWNMGIKDKRFLIIIKKMLRAGVLEDKVILPTEIGTPQGGIISPLLANIYLNNFDWMVAKEFEEHRARYTVKHAFRSGLTKVGRRHKKCFLIRYADDWIILCEDTVQARILLTKIDKYYKHILKLELSKEKTFITDLREKPARFLGFDI

SEQ ID NO: 8513 - protein, 286 aa, synthetic construct
GVDGTTINDYLQMDRKQLINLIQSQIDNYNPSTVRRTYIPKGNTGKLRPLGIPVIVDRIIQEIARMAIEPYCEAKFYPHSYGFRPYRSSEHAIARIVQNINSKAYIAIEGDIKGYFDNINHNKLLAILWEMGIKDKQFLFLIKKMLKSKILDNGNIISSDKGTPQGGIISPLLANVYLNNFDRMVSDLWESHSAVTTYAATRNGKTVEEKNYQFLRKKSVAKHYKTNLVRYADDWIILTETKEYAEKLLTKLRKYMKHQLSLELSEEKTVITDSREEPLHFLGFRI

SEQ ID NO: 8514 - protein, 247 aa, synthetic construct
GIDGVTIEQMDDYLHQNWRETKKLIKERSYKPQPVLRVEIPKPNGGVRNLGIPTAMDRMIQQAIVQVLSPLCEKHFSEYSYGFRPNRSCETAIVQLLEYLNDGYEWIVDIDLEKFFDTVPQDRLMSLVHNIIQDGDTESLIRKYFHSGVVINGQRHKTLVGTPQGGNLSPLLSNIMLNELDKGLEKRGLRFVRYADDCVITVGSEAAAKRVMHSVSSYIEKRLGLKVNMTKTKIVRPNKLKYLGFGF

SEQ ID NO: 8515 - protein, 249 aa, synthetic construct
GIDNMSIEEFNDFAKLHWLGIKQQLLNGSYQPLPVKRVMIPKPDGGERMLGIPAVIDRVIQQAIAQVISPYFEPQFSPHSYGYRPHKRASQAVNHVQSCVKQGYKTAVDIDLSKFFDEVDHDMLMNRVSRKIKDKALMRLLGKYLRAGIAERETGLWFESTKGVPQGGPLSPLLSNILLDELDKKLTYKHLKFARYADDIIILVKTKSEGLIIQREITAFITKRLKLKVNESKSRVGPVSGSKFLGFTF

SEQ ID NO: 8516 - protein, 247 aa, synthetic construct
GIDDMTVNDLLPYLRENKTELIASLREGKYKPAPVKRVEIPKPNGGVRKLGIPTVVDRMVQQAVAQILTPIFERVFSDNSFGFRPHRGAHDAIAKVVDLYNQGYRRVVDLDLKAYFDNVNHDLMIKYLQQYIDDPWTLRLIRKFLTSGVLDHGLFAKSEKGTPQGGPLSPILANIYLNELDKELTRRGHHFVRYADDCNIYVKSQRAGERVMRSITQFLEKRLKVKVNPDKTKVGSPLRLKFLGFSL

SEQ ID NO: 8517 - protein, 247 aa, synthetic construct
GIDGMPVEDLESHLRHHWPTLRQSLLDGTYQPKPVKRVEIPKGDGTKRALGIPTVIDRFVQQIIAQALSALWEPHFHPSSFGFRPARSAQQAVKYVQTLQREKYEWVVDLDLKSFFDEVNHDRLIARLKTRVEDKVLLRLINKFLHAGINANGILLRSEKGVPQGGPLSPILANIVLDELDWELEHRGHKFARYADDCNIMVKSKAAGERVMKSIRRFLETTLRLRVNDQKSAVDRPTKRNFLGFTF

SEQ ID NO: 8518 - protein, 247 aa, synthetic construct
GVDGMQVKELRYWFSNNHQKLIEQLKEGNYRPMTIKGQEIPKPGGGVRQLGIPTVQDRLVQQAIAQQLSKRYDPTFSQYSYGFRKGRNAHQALRQAGAYVKEGFNYVVDLDLEKFFDKVNHDRLMWLLGRRISDKRVLKLIGKFLRSGILIGGLENQRISGTPQGSPLSPLLSNIVLDELDKELERRGHRFVRYADDMILLVRSQEAAERAYSSITSFIENRLLLKVNKDKSRICRPYQLNFLGHSI

SEQ ID NO: 8519 - protein, 247 aa, synthetic construct
GIDGVTTAEWPEHARAHWPATREQIEAGRYRPQPVRRVDIPKPDGGQRQLGIPTVTDRVIQQAIAQVLIPIFDPGFSASSFGFRPGRNAHQAIRQVQAHVKAGYRWAVDLDLARFFDNVNHDLLMSLLSRSIADKRLLALIGRYLRAGVLVGEHPQPSEVGTPQGGPLSPLLANVLLHQFDLELERRGHRFARYADDVIILVKSRRAAERVMQSLTYFLQSTLKLTVNLAKSQVAPMSECSFLGFTL

SEQ ID NO: 8520 - protein, 247 aa, synthetic construct
GVDGVTIDAFPERFRPLWGDIRASLATGTYQPQPVLRVEIPKPTGGTRPLGIPTVLDRLIQQATAQVLTPIFDPEFSASSFGFRPGRSAHNAVRQLREYLRQGYRIAVDIDLAKFFDTVNHDLLMTMVGRRVRDKRVLTLIGRYLRAGVEVDGRLEKTRMGVPQGGPLSPLLANILLDHLDKELESRGHKFVRYADDFVILVKSERAGERVMGSVRKYLTNKLKLTVNEDKSKVARSGDLSFLGFVF

SEQ ID NO: 8521 - protein, 248 aa, synthetic construct
GIDGMTIEAFPLWMQQGGWQRCKSLLERGEYNPSAVRRVEIDKPDGGKRKLGIPNVIDRVIQQAIAQILTPLFDPFFSANSFGFRPNRNAKQAVLQVRDIIKQKRKFAVDVDLSKFFDRVNHDLLMTQLRIKVQDKRLLALIGKYLRAGVTVNDQFEASFEGVPQGGPLSPLLSNIMLDSLDKELESRGHKFARYADDFIILVKSIRAGERVLKSITRYLATKLKLVVNEQKSQVVEVGQSKFLGFTF

SEQ ID NO: 8522 - protein, 248 aa, synthetic construct
GIDGMNIDEFPAWVRSGNWKALKQQLVTGCYQPSPVRRVEIAKPDGGTRQLGIPTVTDRVIQQAITQVLTPIFDPEFSEHSFGFRPGRNGQQAVKQVQSIIKEGRRFAVDVDLSKFFDRVNHDLLMTRLGDKVKDKRLLRLIKRYLRAGFIDNQFKGESRVGVPQGGPLSPLLANIMLDSLDKELEKRGHKFARYADDFTILVKSQRAGERVLRSISQYLQSRLKLVVNTDKSRVVKTNESQFLGFTF

SEQ ID NO: 8523 - protein, 247 aa, synthetic construct
GVDNMPVTALKGYLQEEWPRIREELLTGTYHPQPVRKVEIPKPGGGTRMLGIPTVLDRLIQQAVHQVLSPLFDPGFSISSHGFRPGRSAHQAIKAARKYVESGLRWVVDIDLEKFFDRVHHDTLMSLVKRKVGDRLVLSLIDSYLKAGILEGGVTSPRLEGTPQGGPLSPLLSNILLDELDKKLERRGHKFCRYADDANIYVATRRSGERVMASITGYLSERLKLTVNQGKSAVDRPWKRSFLSYSM

SEQ ID NO: 8524 - protein, 247 aa, synthetic construct
GADGMTVADLAGYVKQYWPTLKARLLAGEYHPQAVRAVEIPKPQGGTRQLGIPSVVDRLIQQALQQQLTPIFDPLFSDYSYGFRPGRSTHQAIEMARAHVTAGHRWCVELDLEKFFDRVNHDILMACIERRIKDKCVLRLIRRYLEAGIMSGGVVSPRQEGTPQGGPLSPLLSNILLDELDRELERRGHRFVRYADDANIYVRSPRAGERVLVSVERFLRERLKLTVNRKKSQVARAWKCDYLGYGM

SEQ ID NO: 8525 - protein, 247 aa, synthetic construct
GVDEKDIEATRLYLRENGQEIIQLIREGKYKPQPVRRVEIPKANGGKRQLGIPTVTDRVIQQAVVQRLTPIFERQFSHFSYGFRPNKSAHQAIEQARQYIEEGYNFVVDMDLEKFFDRVQHDKLMSLIAKTISDKPTLKLIRRFLQAGVMVNGVVITNREGTPQGGPLSPLLSNIILNELDKELEKRGHKFVRYADDCNIYVKSIKAGERVKQGVTEFLERKLKLKVNEEKSAVGKPSARTFLGVSF

SEQ ID NO: 8526 - protein, 248 aa, synthetic construct
CGVDGMKVDELLQYLKQNGKTLIASIFNGKYCPKAVRRVEIPKPDGGIRLLGIPTVVDRTIQQAISQVLTPIFEKTFSENSYGFRPKRSAKQAIKKAKEYMEEGYKWVVDIDLAKYFDTVNHDKLMALVARKIKDKRVLKLIRLYLQSGVMINGVVSETERGCPQGGPLSPLLSNIMLTELDRELEKRGHKFCRYADDNNVYVRSKKAGDRVMRSITRFIENKLKLKVNKEKSAVDRPWRRKFLGFTF

SEQ ID NO: 8527 - protein, 247 aa, synthetic construct
GVDEMDVKSLRLHLHENWTSIRNEIIEGSYFPKPVRRVEIPKPNGGVRKLGIPTVMDRFLQQAIAQILTQLYDPTFSERSFGFRPHRRGHNAVRQAKQWMKEGYRWVVDIDLEKFFDKVNHDRLMRKLSSRIQDPRVLQLIRRYLQTGVMERGLVSPNTEGTPQGGPLSPLLSNIVLDELDNELEKRGLKFVRYADDCNIYVRSKRAGLRIMESVTSFIENRLKLKVNREKSAVDRPWNRKFLGFSF

SEQ ID NO: 8528 - protein, 247 aa, synthetic construct
GIDEMSVKFLRRHLYDNWDSLRENLRKGTYTPSPVRRVEIPKPSGGVRMLGIPTVTDRFIQQAIAQVLHTIFDPSFSEHSYGFRPNRRGHDAVRKARGFIKEGYRWVIDMDLEKFFDKVNHDKLMGVLAKRIKDKELLRLIRKYLQSGVMINGIVVSSEEGTPQGGPLSPLLSNIILDDLDKELEERGLRFVRYADDCNIYVRTKKAGNRVMNSITTFIEEKLRLKVNKEKSAVDRPWKRKFLGFSF

SEQ ID NO: 8529 - protein, 246 aa, synthetic construct
GVDGLGIVETAEHLKTAWPGIRAQLLAGTYRPDPVRRVLIPKPGGGERKLGIPTVTDRLIQQALLQVLQPLLDPDFSNHSYGFRPERSAHQAVLAAQQYIHSGRQIVVDVDLEQFFDCVEHDVLIARLGRKVKDRDVLRLIRAYLNSGALIEGMVMTSTRGTPQGGPLSPLLANVVLDEVDKELERRGHCFVRYADDANVYVRSPKAGQRVMALLRRLYGRLGLRVNESKSAVASAFGRKFLGFSF

SEQ ID NO: 8530 - protein, 246 aa, synthetic construct
GVDGLDIGQTARHLVTAWPVIREQLLKGTYRPDPVRRVTIPKPDGGERELGIPTVTDRLIQQALLQVLQPILDPTFSEHSYGFRPGRRAHDAVLAAQSYVQSGRRIVVDVDLEKFFDRVNHDILIDRLKRRIDDAGVIRLVRTYLNSGIMDDGVVQQRDQGTPQGGPLSPLLANVLLDEVDKELERRGHCFARYADDANVYVRSRRAGERVMALLRRLYGRLRLKVNETKSAVASVFGRKFLGYSL

SEQ ID NO: 8531 - protein, 247 aa, synthetic construct
GVDGRTVQQTGEDLKTQWPDIRRGLLDGTYRPSPVRRVGIPKLGGGTRELGIPTVVDRLIQQALLQVLQPLIDPTFSEHSYGFRPGRSAHQAVQAARQYVEQGRRVVVDVDLGKFFDRVNHDILMDRLGKRIADKAVLRLIRHYLNAGIMAHGVMQMRVEGTPQGGPLSPPLLANVLLDEVDRALERRGRKFVRYADDCNVYVKSERAGQRVLDGVRACYAKLRLKVNETKTAVATAWGRKFLGYCL

SEQ ID NO: 8532 - protein, 246 aa, synthetic construct
GVDGLTIEETPEYLKTHWSRIRLELLNGTYRPQAVRRVEIPKPTGGMRELGIPTVLDRLIQQALLQVLQPMIDLTFSEFSYGFRPGRSAHDAVLQAQRYVQEGFQVVVDVDLEKFFDRVNHDILMDRLAKRIADKAVLRLIRQYLQAGIMAGGVVMDRSEGTPQGGPLSPLLANVLLDEVDLDLQRRGHRFARYADDCNVYVRSQKAGERVLLSLRKLYEKLHLKVNEKKTEVGPVFGRKFLGYCL

SEQ ID NO: 8533 - protein, 247 aa, synthetic construct
GVDKLTVQELKPWLKQHWLSVKGTLIAGSYLPRAIRKVDIPKPNGDVRTLGIPTVVDRLIQQAIAQTLSPYVEPSFSNSSYGFRPNRNAWQAVRQAQQYIQSGKRWVVDMDLEKFFDRVDHDILMSRLARTIKDKRLLKLIRRYLEADMVEGKEVIKRDKGMPQGGPLSPLLSNILLDELDKELERRGHSFCRYADDCNIYVSSQKAGKHAQKDISEFLMNTLKLQVNVRKSAVARPWERKFLGYSF

SEQ ID NO: 8534 - protein, 247 aa, synthetic construct
GVDNLSVGELKGWLKQHWASVREALLQGNYVPQAIRQVEIPKPDGGVRILGIPTVVDRLIQQAIQQHLTPDYEPEFSDSSYGFRPGRNAGQAVQQAQSYMQSGRRWVVDLDLEKFFDRVNHDILMARLSWKIKDTRLLKLIRRYLEADRVAGSEITRRREGMPQGSPLSPLLSNILLTDLDRELERRGHKFCRYADDGNIYVCSRQAGEHAMKEISHYLENKLRLKVNAHKSAVDRPWKRKFLGYSV

SEQ ID NO: 8535 - protein, 247 aa, synthetic construct
GVDALEVTALRDWLKVSWPSVRAALLGGQYIPQSVRAVDIPKPSGGVRTLGIPTVVDRLIQQALLQVLQPLYEPGFSESSYGFRPRRSAQQAVLQAQRYVQEGRRWVVDIDLEKFFDRVNHDILMSRVARQVKDVRVLKLIRRYLEAGLMRGGVVEARRQGTPQGGPLSPLLSNILLTDWDRELEKRGLAFCRYADDCNIYVRSQAAGQRLLAGMMTFLAERLNLQVNEAKSACARPWARKFLGYSL

SEQ ID NO: 8536 - protein, 247 aa, synthetic construct
GVEGMSVSELPDYLKHHWPELKAQLLSGSYCPSPVRRVTIPKPGGGERLLGIPTVVDRFVQQATMQVLQRQWDASFSDSSYGFRPGRSAHQAVKQAQGYIGSGHHWVVDLDLEKFFDRVNHDVLMSRVAKRVSDKRVLSLIRGFLNAGVMEAGLVSPVTEGMPQGGPLSPLLSNLLLDDFDKELEKRGLKFARYADDCNIYVKSERAGNRVMEGLTHWLSRKLKLKVNAKKSAVAHPAMRKFLGYSF

SEQ ID NO: 8537 - protein, 249 aa, synthetic construct
CGVDGMTVQALPAFLREQWPSIRATLLNGTYKPQPVRRVEIPKPDGGGVRKLGIPCALDRFVQQAVLQVLQRQWDPTFSEASYGFRPGRSAHQAVAKAQSYIQSGYRWVVDLDLEKFFDRVNHDILMSRVARRVSDRRVLKLIRSFLTAGVMEHGLVGATDEGTPQGGPLSPLLSNLMLDDLDRELGRRGLRFVRYADDCNVYVRSERAGQRVMVGLKAFLTGKLKLKVNEAKSAVARPHTRKFLGFSF

SEQ ID NO: 8538 - protein, 247 aa, synthetic construct
GVDGMTVIGIKDYLKQHWPAIRGQLLSGTYEPKPVRRVEIAKPDGGVRKLGIPTVLDRFIQQAVMQVLQRRWDRTFSDYSYGFRPGRSAQQAVAQAQQYIAEGHGWCVDLDLEKFFDRVNHDKLMGQIAKRIADKRLLKLIRAFLNAGVMENGLVSPSVEGTPQGGPLSPLLSNLVLDEFDRELERRGHRFVRYADDCNIYVRSERAGQRVMESITQFITQKLKLKVNETKSAVARPQERKFLGFSF

SEQ ID NO: 8539 - protein, 247 aa, synthetic construct
GVDGMTVDDLPTYLKANWLTIRAQLLDGTYKPQAVRRVEIPKASGGVRLLGIPTVVDRFIQQAVLQVLQGEWDRTFSDASYGFRPGRSAHQAVTKAQAYIASRHRIVVDIDLEKFFDRVNHDILMGLVAKRVADKRLLKLIRGFLTAGVLEGGLVSPTEEGAPQGGPLSPLLSNLMLDVLDKELERRGHRFVRYADDCNIYVRSRKAGERVMASIETFLERCLKLKVNRAKSAVARPNHRKFLGFSF

SEQ ID NO: 8540 - protein, 248 aa, synthetic construct
GQDGITFEHIEERGRAGFLGAVAEELRTGTYRPRPYRRREIPKEGGKVRVISIPSIRDRVVQGALRLVLEPIFEADFSGSSFGARPGRSAHEAIDTVRQGLRRRRHRVVDVDLKAYFDSIRHAPLLERVARRVQDGEVLALVKQFLRSTGDRGIPQGSPLSPLLANIALNDLDHVLDRGRGFLTYARYLDDMVVLAPDSEKGRRWAARALERIRQEAEALGVSLNKEKTRTVTMTDRNASFAFLGFDF

SEQ ID NO: 8541 - protein, 255 aa, synthetic construct
GIDDLSFEDIEASGRIVFLAEIQADLKTGRYEPKPNRRVEIPKSNGKVRVLQVPCIRDRVVQGALKLILEAVFEADFCPNSYGFRPKRSPHRALAEVRRSVLRRMSTVVDVDLSRYFDTIQHSTLLGKIAKRIQDPQVMHLVKQVIKAAGKVGVPQGGPFSPLAANIYLTEIDWMLDEIRRKTAQGPYEAVNYHRFADDIVITVSGHHTKRGWAERALLRLREQLVPLGVELNTEKTTVVDTLHGEAFGFLGFDL

SEQ ID NO: 8542 - protein, 255 aa, synthetic construct
GIDGKSFADIELEGVIPFLTGIQEELQAGIYQPQANRKVEIPKTNGKMRTLQIPCIRDRVVQGALKLILEAIFEADFCPNSYGFRPKRSPHQALAEVRRSILRRMTIIIDVDLSRYFDTIRHNILLEKIAKRVQDPQVMHLVKQVIKATGKIGVPQGGPFSPLAANIYLNEVDWTFDTIRRKTADGNYEAVNYHRFADDIVIAVSGHSSKSGWAELALRRLWEQLKPLGVELNLEKTQMVNVLKGESFGFLGFDL

SEQ ID NO: 8543 - protein, 255 aa, synthetic construct
GIDGVTFESIETEGSRKYLQRIRHELITKTYSPNRNRRKEIPKSGEKFRTLNIPCIRDRIVQTALKLILEPIFESDFQKGSYGYRPKRNAHEAVQKVTEAAIKGNTKVIDVDLKSYFDSVRHHILMEKIAKRINDKEIMRMIKLILKIGGKRGMAQGSPLSPLLSNIYLNEVDKMLEKAKEVTKEGKYQRMEYARWADDLVILIREYPKREWLERAVYRRLEEELAKLEVRVNEEKTKVINLKKGETFSFLGFDF

SEQ ID NO: 8544 - protein, 256 aa, synthetic construct
GVDGITFEDIEGIGVLKYLKKIREELVNETYKPQENRKQEIPKGNGKVRVLGIPTIKDRIVQGALKLILEPIFEADFQESSYGYRPKRTAHQAVKKIEKAIVSGKRKVIDLDLSSYFDTVKHHILLAKIAKRVIDKEVMHLIKLMLKASGKEGVPQGGVISPLFANLYLNEVDRMLERAKEVTKSKGKYTELEYARFADDIVIAVSSHPSMNWLLSKVIQRLKEELDKIKVKVNKEKTKVVNLEKGERISFLGFTL

SEQ ID NO: 8545 - protein, 255 aa, synthetic construct
GIDGVTFEAIEESGVEQFLGEVRKELVSGSYRPLKNRRKAIPKGDGKERVLGIPSIRDRVVQGALKLILEPIFEADFQSGSYGYRPKRMAHQAVNRVAIAIAQGKTQVIDADLKSYFDTVQHDLALRKVSERVDDDQVMHLLKLIFKTSGKRGVPQGGVISPLISNLYLNEVDKMLERAKEVTRKGKYTHIEYARFADDLVILVDGHHRWNGLARKVYQRLGEELAKLKVQLNLEKTRVVDLTRGEDFTFLGFNI

SEQ ID NO: 8546 - protein, 255 aa, synthetic construct
GIDGITFDNIEASGIEIFLQQIQKELISGTYWPTQNRRKEIPKGDGKYRILGIPTIRDRVVQGALKLILEPIFEADFQEGSYGYRPKRNPHQAIDRVAKAVVENKTRVIDLDLRSYFDTVRHDLLLKKVAKRVNDENVMRLLKLILKASGKRGVPQGGVISPLLANLYLNEVDKMLEKAKEVTRHEQYTHIEYARFADDIVILIDAYPKWNWLEKAVYQRLLEELTKLDVQLNEEKTRIVNLANGESFGFLGFDF

SEQ ID NO: 8547 - protein, 253 aa, synthetic construct
GIDRITLEEVEEYGVARLLDELAVELKEGSYRPLPARRVFIPKPGTVEQRPLSIPSVRDRIVQAAWKLVAEPVFEADFLPCSFGFRPRRGAHDALQVLIDESWRGCRWVVETDIANCFEAIPIEKLMQAVEERVCDQPFLKLLRVMLRAGVMEEGQVRRPVTGTPQGGVASALLCNVYLHRLDRAWDVDEHGVLVRYADDALVMCRSRRQAEAALTRLRELLADLGLEPKEAKTRIVHLRVGGEGVDFLGFHH

SEQ ID NO: 8548 - protein, 263 aa, synthetic construct
GVDHVSMEAIASNPRKYLYPLWNRLSSGSYFPPPVKLVPIPKGDGKERMLGIPTIIDRVAQEVIKAELEVIVEPRFHPSSFGYRPHKSAHEALEQCAKNSWERWYVVDLDIKGFFDNIDHEKMMGILRKHTNKKHILLYCDRWLKTPMQDRVGGVQARMKGTPQGGVISPLLANLYLHEAFDQWISTTQPRIVFERYADDIVIHTRSMEQSHFILDKLKARLKSYSLELHPDKTKIVYCYRTARFHKEGKEIPVSFDFLGFTF

SEQ ID NO: 8549 - protein, 260 aa, synthetic construct
GVDGMTIEAFEHNLARNLYKIWNRLSSGCYMPPPVKRVEIPKSDGKTRPLGIPTVSDRVAQMAVKMILEPQWDPLFSDSSFGYRPGKSAHDAVAQAKANCWKYEWVIDLDIRGFFDNLDHALLLKAVDHLHPAPWVRLCIVRWLKAEIIFPDGHRHSPEKGTPQGGVISPLLANLFLHYTQDKWLEKHYPNNSWERYADDSIIHCRSRREAGLLLSQLRERMKACGLELHPEKTRIVNCHPLTRRKNDGHYSFDFLGFTF

SEQ ID NO: 8550 - protein, 259 aa, synthetic construct
GADNVCIDMFEHNLENELYKLWNRMSSGSYMAPPVKRVEMAKADGKLRPLGIPTVADRVAQMVVKMTLEPEWDSKFHASSFGYRPRRSAHHAVQAAKINCWKYSWVIDLDIKGFFDNLNHDQLQKFVAQATDDPWCKLYIKRWITAGVQMPGGELHKTAKGTPQGGVISPLLANLYLHKVFDSWMQKYFPQNPFERYADDIVCHCRTEHEAEQLLSAISRRMQRFDLTLHPEKTKIVYCGRRKIERTKAQSFDFLGFTF

SEQ ID NO: 8551 - protein, 262 aa, synthetic construct
GPDGVTVEQFEANVKDRLYVLWNRMSSGSYFPGPVGAVEIPKKGVKGGARTLGIPNVVDRVAQTVLKLALEPKVEPVFHRDSYGYRPGRSQRQALEVCRKRCWSHDWVVDLDVRKFFDTVPWEKLLKAVAYHTDQKWVLMYVERCLKAPTKHADGTLQERTMGTVQGGPFSPLAANIYLHWGLDAWMAREFPTVPFERWADDVVFHCVSLEQAREVRDAVVARLVEVGLEAHPDKTRIVYCKDSNRGGDYENTSFTFLSYTF

SEQ ID NO: 8552 - protein, 261 aa, synthetic construct
GIDTVSIEQFDESLSKNLYKLWNRMASGSYFPPAVKEVEIPKKDGKVRKLGIPTISDRIGQMVVKMYLEPRLENVFNPNSYGYRPNKSAHQALEQVRKNCWKMDWVIDLDIKGFFDNIDHHKMMLAIEKHVPERWVRLYIARWLASPVMTKSGNLVSNQGRGTPQGGVISPLLANLFLHYGLDKWLEQNDNTVKFTRYADDVIVNCKSQKHAEQTLEAIKSRMHQIGLELHPEKTKIVYCRDYRRQEKYSNVKFDFLGYSY

SEQ ID NO: 8553 - protein, 260 aa, synthetic construct
GIDTQSLEQFEERLADNLYKIWNRMTSGSYHPKAVREVQIPKKSGGYRGLGIPTVSDRVAQQVVKSYLEPKVEPSFHQDSYGYRPNKSAHDALAKTVRNCGYYSWVVDLDIRGFFDNIDHELLMKAVRVYTDEKWIIMYIERWLEVGVVREGKVHKREKGTPQGGVISPLLANIFLHFVFDKWMEKHHGNMPFERYCDDAIIHCTTWNQAVFIKNAVTKRMKECKLELNSEKTKIVYCKNSIHRESNPVPVSFTFLGHTF

SEQ ID NO: 8554 - protein, 260 aa, synthetic construct
GIDKVTLEDYEKNLRGNLYKLWNRMSSGSYFPPSVKLVEIPKSTGGKRPLGIPTVSDRVAQMAVVMLITPSIEPCFHEDSYAYRPHRSAHDAVGKARERCWKYAWVLDMDISKFFDTIDHELLLKALKRHTQEKWVLMYIERWLKVPYEKSDGSQVDRALGVPQGSVIGPVLANLFLHYTFDKWMEKNFPRVPFERYADDTICHCHSLKQAEYMQAMIQQRFECCRLRLNEEKTKIVYCKSSRQKECYPNVTFDFLGFTF

SEQ ID NO: 8555 - protein, 261 aa, synthetic construct
GVDGVGLAGFESDLKGNLYRIWNRMSSGSYFPPPVKAVEISKEHGAGTRMLGVPTIGDRIAQTVVAARLEGVVEPKFHPDSYGYRPRKGSLDAVRKCRERCWKYDWVIDLDVRKFFDTVPWDRIIAAVEANTALPWVLLYVKRWLAAPVRMPDGTLAERDRGTPQGSAVSPVLANLFMHYAFDLWMVREFPACPFERYADDAVVHCKSLAQARFVLDRLRKRMEQVGVSLHPEKTRIVYCKDGKRRGSHEHTEFTFLGFTF

SEQ ID NO: 8556 - protein, 261 aa, synthetic construct
GVDGQSIDAFEKDLKNNLYRIWNRMSSGSYFPPPVRAVEIPKAHGGGVRVLGVPTVADRVAQTVVAMTLEPRMEQVFHDGSYGYRVGRSALDAVGACRQRCWQRDWVVDLDIQDFFGSCPHDLIVRAVEVNTDQPWVVLYVRRWLTAPVCYPDGSLVTPDRGTPQGSAVSPVLANVFLHYALDLWLAREFPGLPFERYVDDAVVHCATRRQAEQVRTAIGRRLEEVGLRCHPAKTKVVYCKDSGRRGSHEHTSFTFLGYTF

SEQ ID NO: 8557 - protein, 260 aa, synthetic construct
GLDGLTMEAFEEDLKNQLYRLWNRMSSGSYFPPPVMRVEIPKSDGGVRGLGIPTIGDRIAQAVVKRYLEPLVEPKFHEDSYGYRPNRSALDAVRQARQRCWRDDWVLDLDISKFFDKLDHALVMRAVKRFTDCKWVLLYIERWLKADVQLQDETILHREMGTPQGGVISPLLANIFLHLGFDQWMKENYPHIHFERYADDIVVHCRSLKQLQWIKKRIEQRLKLCKLSLNDKKTRVVYCKDSRRSGEWTCQSFDFLGYTF

SEQ ID NO: 8558 - protein, 260 aa, synthetic construct
GADEQTIKEFEEHLNNNLYKLWNRMASGSYFPKPVRAVAIPKKNGGIRILGIPTVEDRIAQMVAKMYFEPLVEPMFYNDSYGYRPNKSAIQAVGQARERCFKRDWALELDIKGLFDNIKHGYLMYMVEKHTQIKWLILYIKRWLTVPFIMSDGSVAERRSGTPQGGVISPVLANLFLHYVFDDFMTKAYPNIWWERYADDGVLHCQSYKQAAFIKQKLEERFQQFGLELNKEKTRIVYCKDNRRPQNYSCTQFTFLGYTF

SEQ ID NO: 8559 - protein, 260 aa, synthetic construct
GVDGQSLEDFAGDLENHRYRLWNRLVSGSYFPPPVRRVEIPKAGGGIRPLGIPTVADRIAQMVVKRCLEPVLDGEFDPDSYGYRPGKSAHQAIEQARKRCWQHDWVVDLDNKSFFDTIDHELLMRAVYRHTKADWIRLYIERWLKAPVEMPDGSVRARTTGRSQGGVVSPILANLFLHYVFDVWMKGSYPHIPFERYADDIICHCRTRQEAEELKSALERRFADCHLLLHPEKTKVVYCADSNRRRSYPQIHFDFLGFSF

SEQ ID NO: 8560 - protein, 260 aa, synthetic construct
GVDGQTLESFGERLGPNLYKLWNRMSSGSYMPSSVRRVMIPKADGGQRPLGIPTVTDRIAQEVVRLYLEPLVEPVFHRDSYGYRPERSAIDAIRKARQRCWRYDWVLDMDIKGFFDTIDHELLLKAVRHHTDCRWVLLYIERWLKAPVRMEDGSLVPQERGTPQGGVISPLLANLFLHYAFDRWLDRENPQVPFERYADDIICHCRTEDEARRLWQQVENRLAGCGLTLHPQKTKIVYCKDTNRKGSFPTVAFDFLGYRF

SEQ ID NO: 8561 - protein, 260 aa, synthetic construct
GVDGQSIEEFEQDLSGNLYKLWNRLASGSYMPPAVRCVEIPKATGGTRPLGIPTVADRIGQMVVKDALEPILEPCFHHDSYGYRPNKSAHDALAVARQRCWRAAWVLDVDIKGFFDNIDHALLMKAVRKHIDCRWITLYIERWLTAPVQLPDGTSQARNKGTPQGGVISPLLANLFLHYVFDMWMVRNFPANGFERYADDVVIHSTSLKQVTMLRAQLTERLADCKLEMSPGKTKIVYCKDKRRKGGYPEISFDFLGYTF

SEQ ID NO: 8562 - protein, 260 aa, synthetic construct
GIDKISIEKYEKNLKNNLYKLWNRMASGTYFPKAVKAVEIPKKNGGIRVLGVPTVEDRIAQMIVKLSMEKIIDPIFLNDSYGYRPNRSAHDAIKVTRSRCWKYDWVLEFDIKGLFDNINHKLLLKAVYKYAKYKWEILYIKRWLANPVSNNNKITKNTENGTPQGGVISPLLANLFLHFAFDKWMEKRFPNNKWCRYADDGIIHCNSRAEAIFILNCLKERMKECKLEIHPGKTKIIYCKDSNRKENNKLHEFTFLGYSF

SEQ ID NO: 8563 - protein, 260 aa, synthetic construct
GIDEVTLQEYENNLEDNLYKLWNSMSSGSYFPQAVRGVEIPKKNGGVRVLGVPSIDDRIAQNVMVSELNPKVEPIFYEDSYGYRENKSAIDAIEVTRKRCWEYDWLIEFDIVGLFDNINHDLLMKAVKQHTNEKWVILYIERTLKVPMVMSDGIHVERTKGTPQGGVISAVLANLFMHYAFDHWMTRKHSNNPWVRYADDGLIHSHSLKEAEVLLLKLGERFKDCHLEIHPNKTKIIYCKDDNRKQNHIHTNFDFLGYTF

SEQ ID NO: 8564 - protein, 260 aa, synthetic construct
GVDQESIEAFEKNLKGNLYKLWNRLSSGSYFPPPVKGVGIPKKTGGIRMLGVPTVADRVAQTVGKETLEPLLEPIFHQDSYGYRPGRSALDAVGVVRERCWKYDWVVEFDISKFFDTMNHELLMRAVRKHCQIEWVLLYVERWLKAPMMSPEGDLVERTKGTPQGGVISPLLANLFLHYAFDRWVSENLPGVPFCRYADDGVLHCKSKEQAVLVMKKITKRFEACGLRVNPDKTRIVYCKDDKRKEDHPVTSFTFLGYTF

SEQ ID NO: 8565 - protein, 260 aa, synthetic construct
GVDRESLQAFETKLKDNLYKVWNRLSSGSYFPPPVRGVGIPKKSGGVRMLGVPTVADRVAQSVVKMVLEPILEPVFHEDSYGYRPGRSAHDAIAVVRKRNWEYDWVVEFDIKGLFDNIDHELLMRALRKHCQTPWVFLYVERWLKAPMETPEGELIERTKGTPQGGVVSPLLANLFLHYAFDRWVSENLPGVPFCRYSDDGVLHCKSKIQAELVKRKIGERFRECGLELHPDKTQIVYCRDSNRKDEHPVNQFTFLGFTF

SEQ ID NO: 8566 - protein, 260 aa, synthetic construct
GIDDETIADFERNLPKNLYKLWNRMSSGSYFPPPVKAVEIPKASGGIRRLGVPTVSDRIAQTVVKLLIEPKLDALFHPDSYGYRPGRSAKQAIAITRERCWRYDWVVEFDIKAAFDHIDHELLMKAVRTHIKEDWILLYIERWLVAPFEAADGVRIQRERGTPQGGVISPMLMNLFMHYAFDAWMQRNSPNCPFARYADDAVVHCRSQRQAEHVMRSIASRLAVCGLTMHPEKSKIVYCKDSNRRAGYPHVSFTFLGFTF

SEQ ID NO: 8567 - protein, 272 aa, synthetic construct
GVDGVTIEDFEKDLKNNLYKIWNRMSSGSYFPTPVAAVSIPKKSGGERVLGIPTVSDRVAQTVVRDKLEIMLEHHFLDDSYGYRVGKSAHDAIEVTRRRCWQYDWVLEFDIKGLFDNIRHDLLMKAVKKHVQLAEESQSRDYQWITLYIERWLVAPLQKADGTQTERELGTPQGGVVSPVLANLFLHYVFDKWLEKNYPDNPWCRYADDGLVHARTKPKAEKLRDELAKRFKECGLEMHPIKTKIVYCKDDIRRGSGKHIEHKQFDFLGYTF

SEQ ID NO: 8568 - protein, 260 aa, synthetic construct
GVDGVTIEQFEKDLKGNLYKIWNRMSSGAYFPPPVRAVSIPKKSGGQRILGVPTVADRVAQTVVKEIIEPALDAIFLADSYGYRPDKSALDAVGVTRERCWKFDWVLEFDIKGLFDNIDHTLLMRAVRKHVACPWALLYIERWLTAPMMQEDGTLIERTRGTPQGGVVSPVLANLFMHYTFDLWMARTFPHLRWCRYADDGLVHCRSEREARIVWEALASRMAECRLELHPTKTKIVYCKDDRRKANFENVAFDFLGYCF

SEQ ID NO: 8569 - protein, 259 aa, synthetic construct
GVDGQTLEIFEKDLAANLYKIWNRMSSGTYFPPPVRAVSIPKKAGGERVLGVPTVSDRIAQMVVKQMIEPDLDSLFLPDSYGYRPGKSALDAVGVTRQRCWKYDWVLEFDIKGLFDNLPHDLLLKAVRKDVKCNWALLYIERWLTAPMEKNGEVIERSRGTPQGGVVSPILANLFLHYAFDLWMTRTHPDLPWCRYADDGLVHCQSEQQAEALRVELSSRLAACGLQMHPTKTKIVYCKDQRRREAYPNVTFDFLGYQF

SEQ ID NO: 8570 - protein, 259 aa, synthetic construct
GVDGQTIEQFEADLKGNLYKIWNRMSSGSYFPPPVRAVPIPKKTGGQRILGVPTVSDRIAQMVVKQLIEPELDQIFLKDSYGYRPNKSALDAVGITRQRCWKYDWVLEFDIKGLFDNISHELLLKAVRKHVKCKWALLYIERWLTAPMEQDEQRIERDCGTPQGGVISPILSNLFLHYAFDLWMDRTHPDLPWCRYADDGLVHCRSEQEAEAVKAALQARLAECQLEMHPTKTKIVYCRDSKRRGQHPNVTFDFLGYCF

SEQ ID NO: 8571 - protein, 260 aa, synthetic construct
GIDKQSLADFDKRLVDNLYKIWNRLSSGSYFPPAVKAVAIPKKLGGERILGIPTVSDRIAQTVVKLAFEPQVEPHFLADSYGYRPNKSALDAIGVTRKRCWYYDWVLEFDIKGLFDNIPHELIMKAVDKHNPARWVKLYIQRWLTAPMVMSDGEVRARTMGTPQGGVISPLLANLFMHYVFDKWLAKYYPKVPWYRYADDGILHCHSEAEATEMREVLRKRFSECGLEMHPEKTRVIYCKDGSRKGDYEHTMFDFLGYTF

SEQ ID NO: 8572 - protein, 260 aa, synthetic construct
GVDDENIAAFESDLTNNLYKIWNRMSSGCYFPPSVKAIEIPKKSGGTRILGIPTVLDRVAQMVTKIYLEPQLEPLFHPDSYGYRPGKSAADALAATRKRCWRYNWLLEFDIKGLFDNINHDLLMKQVSMHTDKPWIILYIQRWLKAPFQMADGTVNERTKGTPQGGVVSPLLANLFLHYAFDQWMDSHHRYNPFERYADDSVIHCRSREEAERLWIELDKRLSEFGLELHPSKTRIVYCKDDDRQGDYPETKFDFLGYTF

SEQ ID NO: 8573 - protein, 259 aa, synthetic construct
GIDEQSIDEFERNLKDNLYKVWNRMSSGSYIPPAVKAVEIPKKAGGIRTLGIPTVADRIAQMTVKLYFEPLVEPFFHEDSYGYRPKKSAIQAIETTRKRCWKYNWVLEFDIKGLFDNIDHELLMRAVDKHTDIEWVKLYIKRWLTAPFQTKEGIKERTSGTPQGGVISPVLANLFLHYAFDKWMAINHPRNPFARYADDAVIHCKTEEEAKRVLESLNQRMNECKLELHPSKTKIVYCKDADRREDHKNITFDFLGYTF

SEQ ID NO: 8574 - protein, 260 aa, synthetic construct
GIDEVSLEEFEADLDNNLYKIWNRMTSGSYFPPPVKAIEIEKKSGGKRVLGIPTVGDRVAQMVAKIYLNPLVDPYFHKDSYGYREGKSAIDALEVTRQRCWRYDWVLEFDIKGLFDNIDHELLMRAVKKHVKIPWLILYIERWLKAPFIQANGRVEERSKGTPQGGVISPVLANLFMHYAFDKWMERTHPDKPFARYADDGVIHCRTLEEARLLLESLKERMEECKLKLHPEKTRIVYCKDDKRKGEYPNTSFDFLGYTF

SEQ ID NO: 8575 - protein, 250 aa, synthetic construct
CGIDGETVFNFHLNLELNIEFLHDKLKTNGYEPSPVRRVEIQKPDGGVRLLGIPTVKDRVVQQAIVNIIEPIFDKTFHPSSYGYRPNHSQHGAVAKAERFMNKYGLEHVVDMDLSKCFDTLDHEIMMKAVSERISDGRVLKLIEKFLKAGVMHSDNFSRTEVGSPQGGVISPLLSNIYLNQFDQRMMSKGIRIVRFADDILIFAKDKKTAGNYKAYATQVLENELKLKVNNEKTKLTNVNEGVEFLGFVI

SEQ ID NO: 8576 - protein, 249 aa, synthetic construct
GIDGQSVKDFAESLDVNLDRLLTELREKSYQPQPVRRVEIPKENGGIRLLGIPAVRDRVVQQALLDILQPIFDPDFHPSSYGYRPGRSCHQAITKATMFIRKYDRKWVVDMDLSKCFDTLDHDLILSSLSRRIKDGSILGLLKKILKSGVMTDEGWQASEVGSPQGGVISPLIANIYLDQFDQFMKKRGHRIVRYADDILILCSSKSAAKNALLQASCFLEKGLLLTVNREKTHICHSWSGVAFLGVSI

SEQ ID NO: 8577 - protein, 273 aa, synthetic construct
GVDGVTVRQIRQRGEVGVFLAGIAASLRDGTYRPAPVRRVLIPKPGGKSRPLGIPTVTDRVVQQSLRMVLEPIFEADFLPVSYGFRPKRRAHDAVAEIHFYAGRGYRWVLDADIEGCFDHIDHTALLGLVRERIKDKKTVALVRAFLKAGVLSDLGLEAAAGEGTPQGGIISPLLANIALSVLDEAIMAPWAQGGDQSTQTGRAKRRYHGLGNWRIVRYADDFVIMTNGSRDDVLALKEQAAEVLARVGLRLSESKTRVTHLSEGIDFLGFHI

SEQ ID NO: 8578 - protein, 273 aa, synthetic construct
GVDGRTAASIVARIGIPEYLDGLRSALKDRSFRPLPVRERMIPKAGGKLRRLGIATITDRVVQASLKLALEPIFEADFLPCSYGFRPMRRAHDAVAEIRYLTSKPRCYEWIVEGDIKACFDEISHTSLTGRVRARIGDRRVLALVKAFLKSGILVEDRLVRPTTAGTPQGSILSPLLSNVALSVLDEHVARSPGGPGTGKTEKAKRLRHGLPNFKLVRYADDWCLVIKGTKADAEALREEIAGVLSTMGLRLSREKTLITHIDDGLDFLGWRI

SEQ ID NO: 8579 - protein, 270 aa, synthetic construct
GIDGRTVSRIEGQGVEEFLAGLRESLKSGEFWPVPVKERMIPKANGKLRRLGIPTVADRVVQAALKLVLEPIFEVDFEPCSYGFRPNRRAHDAIAEIHHYASRGYEWVLEGDIEACFDNIDHTALMGRVRERVGDKRVLRLIKAFLKSGIFSEGRAVRDTRTGTPQGGILSPLLANVALAVLDEHFAQVWQETGRTWAARDWHRRRGGATFKLVRYADDFVILAYGSRQHVEDLTADVAQVLSTVGLRLSPTKTAVAHIDEGFDFLGFRI

SEQ ID NO: 8580 - protein, 271 aa, synthetic construct
GVDGVAPRSLLHGQAVEVLTMIRRQVKTGEFRPLPVRERRIPKSNGKTRSLGIPTLADRVVQASLKLVLEPIFEADFYPSSYGFRPRRRAQDAIAEIHKFTSRPLNYEWVFEADITACFDEIDHTGLIQRLRGRITDKRVLALVRRFLKAGILSEDGVNRNTHTGTPQGGILSPLLANIALSGLDDHFQKKWESLGPSWTRAKLRRRGIPVMKLIRYADDFVVLVHGSVEHVEALWHEVAEVLAPMGLRLSVEKTKVTHIDEGFDFLGWRI

SEQ ID NO: 8581 - protein, 261 aa, synthetic construct
GADGITFAQIETEGRERWLENVRQELTAGDYRPQPLLRVWIPKSNGGRRPLSIPTVKDRTVMTAAMLVIGAIFEADLLENQYGFRPKVDAKMAVRRVFWHIRDHRRSEIVDADLRDYFTSIPHAPLMKCLTRRIADGRLLSMIKGWLTVAVIEKDGRRITRTAEARTKKRGTPQGSPLSPLLANLYFRRFLLAWRHGHQDQLDAHIVNYADDFVICCRPGSSETAMARMQTLMNRLGLEVNDTKTRLARVPESVTFLGYTI

SEQ ID NO: 8582 - protein, 265 aa, synthetic construct
GVDGVTIEEIMKTDQGVAGFLEGIENSLRRKTYRPEAVQRVYIEKENGKLRPLGIPTVRDRVVQMATLLILEPIFEADFLDCSYGFRPGRSAHQALEEIRGHVEAGYQAVYDADLKGYFDSIPHTQLLACVRMRVVDRSVLKLIRMWLEAPVVEREEGGGGSKWSRPEKGTPQGGVASPLLANLYLHWFDALFYGPEGPGGKADAKLVRYADDFVVMAKQMGTETIEFIESRLEGKFQLEINREKTRVVDLREEGASLDFLSHTF

SEQ ID NO: 8583 - protein, 261 aa, synthetic construct
FGVDGVSIESIEVRADGISGYLDEIQESLRTKNYKPSPVRRVYITKPNGKLRPLGIPCVRDRIVQAAVLLILEPIFEVDFLDCSHGFRPKRRPHGALDQVGNNLQLGRQEVYDADLSSYFDSIPHEHLIVELERRIADRSVLKLIRQWLHSPVREEDGSISRPKQGTPQGGVISPLLANIYLHRLDRAFHEEADSPYHFARARMVRFADDFVVMARHMGNRITGWLEEKLETDLGLSINRDKTGIVRMNKKESLNFLGFTL

SEQ ID NO: 8584 - protein, 247 aa, synthetic construct
GIDDVTIDEFERNLEQNLNEIQRLLRQDRYVPKPVKRVYIPKPDGKQRPLGIPTIRDRVVQQALKNVIEPIFEAEFLDSSFGYRPGKSAKQAIEQIETVRDEGHEWVVDADIKAFFDTVNHEKLIDAVAERISDGRVLGLIRAFLEADIMEQGQGRAKNVVGTPQGGVISPLLANIYLHYFDERMALGFEVVRYADDVLVLCGSEEEAEEAISHVKEILEELELTLHPQKTKIKNFSEGVDFLGFTV

SEQ ID NO: 8585 - protein, 171 aa, synthetic construct
GVDNQTLDDIREEGIEQLLEQIQHELKTGTYRASCVRRVFIPKSSGKLRPLGIPTVKDRIVQQAVKLIIEPIFEADFLEFSYGYRPNRSAKDASLEIYKWLNYGLTNIVDVDIEGFFDHIDHELLLKFVKERVTDGYILSLIKQWLKAGIVYGKSVTNPTEGTPQGVSFLR

SEQ ID NO: 8586 - protein, 255 aa, synthetic construct
GVDGETIEDIENRGVDQFLTEIQQQLRMKTYRIPKVKRVFIPKGDGKLRPLGIPTIRDRVVQQAVKSIIEPIFEADFKDCSFGYRPGRSAMQASEKIRHLLNLGYTNIVDMDIKGFFDHIDHEKMVFSVMKRITDPYVIKLIREWLRAGIVFQGNTSYPEQGTPQGGVISPLLANIYLNELDSLWTRRGMESPLKHSAHLVRYADDLLALTNKDPQAVAETLERIISLLGLEPNREKSSVITAEDGFDFLGFHFI

SEQ ID NO: 8587 - protein, 262 aa, synthetic construct
GVDGERFEDVEAYGVERWIGELAETLRKKMYQPQAVKRVYIPKPGGKMRPLGIPTLRDRVVQTATMMVIEPIFEADLQPEQYAYRAGRNALTAVREVHSLLKTGHKQVVDADLSSYFDTIPHAELMKSVARRIVDRHLLHLIKMWLDAPVEEGDGRGNMQRTTVNRDQGRGTPQGAPISPLLSSLYMRRFILGWKQRGYEERFGSRIVCYADDLVICCRWQAEQAMAAMQDMMGRLKLTVNAEKTRICRVPEAYFDFLGYTF

SEQ ID NO: 8588 - protein, 263 aa, synthetic construct
GVDRQDFEDVEAYGVRRWLEELALALKEESYRPDPIRRVFIPKANGKLRPLGISTLHDRVCMTAAMLVLEPIFEADLPDEQYAYRPGRNAQQAAEEVKNRLYLGQTDVVDADLSDYFGSIPHSELMKSLARRIVDRRVLHLIKMWLECAVEETDQRGRKKRTTEAKDQGRGIPQGSPISPLLSNLYMRRFVLAWKKLGLERSLGSRIVTYADDLVILCKCGKAEEALQWMRTIMGKLKLTVNEEKTRICQVPAGTFDFLGYSF

SEQ ID NO: 8589 - protein, 263 aa, synthetic construct
GVDRQDFAEVEAYGVQKWLGELALALRLETYRPDSIRRVFIPKANGKLRPLGISTLRDRVCMTAAMLVLEPIFEADLPPEQYAYRPGRNAQQAVIEVEERLHRGQTDVVDADLADYFGSIPHAEMMLSLARRIVDRRVLHLIKMWLECPVEETDDRGRQKRTTEARDSRRGIPQGSPISPLLANVYMRRFVLAWKKLGLQRSLGSRIVTYADDLVILCKKGKAEEALLNLRQIMGKLKLTVNEEKTRICKVPEGEFDFLGFTF

SEQ ID NO: 8590 - protein, 261 aa, synthetic construct
GVDGITFEQIDASGLEAWLAGLRDELVTKTYRPDPVRRVMIPKPGGGERPLGIPTIRDRVVQAAAKIVLEPIFEADFEDGAYGYRPRRNAVDAVKEVHRLMCRGYTDVVDADLSKYFDTIPHSDLLKSVARRIVDRNVLRLIKLWLRVPVEERDSNGKRRMSGGKSNKCGTPQGGVISPLLSVIYMNRFLKHWRLSGRCEAFHGQIISYADDFVILSRGHAEDALTWTKAVMTKLGLTLNETKTSVKNARLESFDFLGYTL

SEQ ID NO: 8591 - protein, 261 aa, synthetic construct
GVDGMTFGQIEGAGVDAWLAGLREDLVSKTYQPDPVRRVMIPKPGGGERPLGIPTIRDRVVQAAAKIVLEPIFEAGFEDSAYGYRPRRSAIDAVKETHRLLCRGYTDVVDADLSKYFDTIPHADLLRSVARRVLDRNVLRLIKLWLQVPVEERDGDGKRHMSGGKSSTRGTPQGGVASPLLSVIYMNRFLKHWRLTGRGEVFHAHVISYADDFVILSRGHAEEALTWTRAVMTKLGLTLNEAKTSVKNARREGFDFLGYTL

SEQ ID NO: 8592 - protein, 253 aa, synthetic construct
GIDDFTIEEIEAYGVQKFLDEIEDQLRNKKYQPKAVKRVYIPKANGKKRPLGIPTVRDRVVQTAVKIVIEPIFEADFQEFSYGFRPKRSANQAIREIYKYLNYGCEWVIDADLKGYFDTIPHDKLLLLVKERVTDKSIIKLLSLWLEAGIMEDNQVRSNILGTPQGGVISPLLANIYLNALDRYWKNNRLEGRGHDAHLIRYADDFVILCSNNPKKYYQYAKQRIDKLGLTLNEEKTRIVHATEGFDFLGYTL

SEQ ID NO: 8593 - protein, 264 aa, synthetic construct
GIDGVTFEAVEEKEGVSAFIAELEDALRNKTYQPDPVKRVMIPKSDGSQRPLGIPTIRDRVAQMAVKLVIEPIFEADFCESSYGFRPKRSAHDAVDDVAYSMNTGYTEVIDADLSKYFDTIPHANLMAVIAERICDGAILHLIQMWLKAPIMEVDKDGTKRNIGGGKGNRKGTPQGGVISPLLANLYLHILDRIWERGNLQQRLGARIVRYADDIVILCRRAKADKAMATLRYVLERLGLSLNEAKTTTVNAYKDKFDFLGFTI

SEQ ID NO: 8594 - protein, 262 aa, synthetic construct
GIDGVTFTAIEAGIGKDAYVAALREELEQKTYRADGVRRVWIPKPDGSERPLGIPTIRDRIVQMAFKLVVEPIFEADFCEHSYGFRPQRSAHDAIDAIAEALLRGHTQVIDADLSKYFDTIPHAKLMGVIAERLVDGPVLGLIRQWLKAPVIEEDERGQHRPTGGKGNRRGTPQGGVASPLLANLYLHLLDRIWVRHDLERRLGARLVRYADDAVILCRHSTEKPMAVFTAVLEKLDLTLNVQKTHVVDARADGFEFLGFRI

SEQ ID NO: 8595 - protein, 263 aa, synthetic construct
GSDGVSFEAIEQGEGVEGFLKGLAEELREKRYRAQPVRRAMIPKGDGRERPLGIPTIRDRVVQMAVKLVIEPIFEADFTPHSYGFRPQRSAHDAIDDIANALWAGHTHVIDADLSSYFDTIPHANLMTVVAERMTDGAILALLKQWLKAPIIGVDDQGKRRTVGGGKANRVGTPQGGVISPLLSNLYLHLLDRIWDRHRLKDKLGAHIVRYADDFVVLCKQGVEEPLKVVRHVTDRLGLTLNETKTHVVDAKETGFHFLGFTL

SEQ ID NO: 8596 - protein, 260 aa, synthetic construct
QCDTSLYQTWLSSIAQDTHSPLKKAELENLLEALHSLSYIPSVAHAIHIPKSDGSYRTLSIPSPIDLYLQRNLINVLYPIIDKTNSPQSYAYRKGKGALEAIKQVELLKRKLGKKYYVVRCDIDNFFDSIPIEQLMGMFQNITRDPLLSRMVRLWIKSGVVDNKSHFHPHLQGLPQGSPLSPLLSNFYLTDTDRYISNNITEYFIRYADDILLFIPEHSDPLSSLQALSNHLKNQKKLSLNKDFIVTEINSEFSFLGISF

SEQ ID NO: 8597 - protein, 259 aa, synthetic construct
VNDALYRKWLSSLAADRDLPMAEAERQDLLEALRVCSYIPQPYHSVNIPKGDGSYRQLHIPSAVDLHLQRSLAGILYPITESLSIAQSYAYRKGKGAVAAIRKVQHLLDSLDENYTVVRCDIDNFFDSIPVPSLLQKVLRTTEDPLLTRMLSLWMKSGVVDRTQQYTPASSGIPQGSPLAPLLSNLYLEDTDRYIAGHITTEFIRYADDLLLFLPERADPLKALQDLSEHLKYRKGLKLNRDFVVSSIKSSFSFLGITF

SEQ ID NO: 8598 - protein, 253 aa, synthetic construct
RKWLSSLAADRDLPMAEAERQDLLEALRICSYIPQPYHSVNIPKGDGSYRQLHIPSAVDLHLQRSLAGILYPITESLSIAQSYAYRKGKGAVAAVRRVQHLLDSLDENHTVVRCDIDNFFDSIPVPSLLQKVQRTTEDPFLTRMLSLWMKSGVVDRKQQYARASSGIPQGSPLAPLLSNLYLEDTDRYIAGHITTEFIRYADDLLLFLPEKVDPLNALQDLSEHLKYRKGLKLNRDFVVSSIKSSFSFLGITF

SEQ ID NO: 8599 - protein, 257 aa, synthetic construct
DTLYRKWLSSLAADRDLPMAETERQDLLEALRICSYIPQPYHSVNIPKGDGSYRQLHIPSAVDLHLQRSLAGILYPITESLSIAQSYAYRKGKGAVAAVRRVQHLLDSLDENYTVVRCDIDNFFDSIPVPSLLQKVQRTTEDPLLTRMLSLWMKSGVVDRKQQYAPASSGIPQGSPLALLLSNLYLEDTDRYIAGHITTEFIRYADDLLLFLPEKVDPLNALQDLSEHLKYRKGLKLNRDFVVSSIKSSFSFLGITF

SEQ ID NO: 8600 - protein, 265 aa, synthetic construct
AIEEVLERHELEPVVDDKGRIMQVDALTELIYTQLSTGVYAPKPTRAIFVPKPKGGKRCIEELEQVDMMVHRLVFNSIAKTIESYQSPLSLGYRKGYSRQMARDKVQALIDSGFGWVVEADIESFFDNVPFERLWQRLATILPQRELQTIALIKKLMQVGYTVSNASGTVVKEHLRFKGLMQGSPLSPVLANLYLAMLDEQINAEHFAFVRYADDVLMFCRSEADANTTLAWLDQHLSELGLNLSLSKTAITAVNNGFEFLGYRF

SEQ ID NO: 8601 - protein, 256 aa, synthetic construct
GAAASRLDRDNDFSASLERDYGSIGNAVFAMRDHILNGEFQCSPAAPFEINKPLGGRRTLGTFSSEDSLAQKLLHRLLSPVLDRMFEHSSVGFRKGRSREDAKRMIQQAIRQGCRYVFESDIDSFFDDIDRSTMLRKLRGVLPQADKMTFRALESCINAGLENEVDSTKGLVQGSSLSPLLSNLYLDSVDERMDEHGYRFIRYADDFVVLAHSEDEWRKACEDMQDSLEPLGLQLKEGKTHISCIDPGFKFLGIEL

SEQ ID NO: 8602 - protein, 257 aa, synthetic construct
GAAASKINRDSDLSSELERDYGSIEKAVFEMRDRILMGEFTCSAAVPFEMHKPYGGSRIIGTCPPEDTLTQKLLHQLLSPVMDRMFEHSSVGFRKGRSREDAKRMIRQAIREGCRYVFESDIDSFFDEIDRPTMLRKLQDALPQADHMTFKALKSCVNAGLVDEDRQDAKGLVQGSSLSPLLSNLYLDGVDERMEELGYRFIRYADDFVVLARSKEECRKAYEDMRLTLAPLGLSLKEQKTRISNIDPGFRFLGIDL

SEQ ID NO: 8603 - protein, 252 aa, synthetic construct
DLAVRLSNTPQAPDLHELAVELAQNLREGAAPLPFQAIRVPRSDGRLRQFETPAARDLVILNHLTRLLSEPFDRLFSVHSIGYRKGHSREDAVERVRAAIAEGCTHVLESDISDFFPSVDLKRLLARLDDVLPRRDVRLRQTLAAYLGAGWRYGEGSVQARNRGLPLGSPLSPLLANLYLDSFDSQLGATVPGVRLIRYADDFIILTESEAAARALLDTARDAAAALGLALNLEKTAIRPLSDGFDFLGIRF

SEQ ID NO: 8604 - protein, 220 aa, synthetic construct
YTPAPNTAFLIKKKSGVDRMVEQIALKDLILQQYLLKTIGNEFERIFEPESIGFRKGISRQRAVEMVQAALKAGYQFIIESDVDDFFPSVDLKILTGLLDRYLPQEDHRIKELLTKTIHNGYVLNGQYHERVRGVAQGSPLSPMLANLYLDYFDETIKGWPVRLIRYADDFIILTRTKEEAEEYLSRTESCLSEIGLKIKKEKTGIKHIREGFRFLGIKF

SEQ ID NO: 8605 - protein, 279 aa, synthetic construct
ALQALSETEKYPFDENQYAENLFQLIVSNGYLPTPHIAFTIKKKSGVDRVVEQLSFRDLIVQQYLLKVISTVFDRFFEAESIGFRKGVSRQRSIGMIQSAIAEGYQCVIESDIEDFFPSVDLDILEHLLDCSIPQNDVCLKNILLKLIRNGFILNGTYYERRKGLAQGGPLSPILANLYLDSFDEQIKRWGLASHDEDAGTDHAKGGAGNKTAGGNASRGVKLIRYADDFIILTRTKEEAEGVLSDTESYLSTLGLKIKKEKTAIRSLRDGFHFLGIRF

SEQ ID NO: 8606 - protein, 229 aa, synthetic construct
VEQIPFRDLIVQQYLLKIISAPFDRFFEAESIGFRRGVSRQRSIEIIQAAIAEGYQYVIESDIEDFFPSVDLNILAHLLDSYIPQNDSCLKKILLKFIKNGYILNGVYHERVKGLAQGSPLSPILANLYLDSFDEQIKQWGLLSPDEHGETASDSKDTPSRAAPAHTPRGVKLVRYADDFIILTKTKKDAEDVLSETEAYLSKLGLKIKKEKTAIRSMKDGFQFLGIRF

SEQ ID NO: 8607 - protein, 247 aa, synthetic construct
GLLQRQTRLIAGDLDRFLAELSASLRGGTYLPAPLLRADIPKRAPGQTRVLHIPTIRDRVVERAVVNAVAHDADRIMSPCSFAYRTGIGTDDAVHHLATLRDDGYRHVLRTDVEDYFPNLDVEDALTVLAPVVGCPRTIDLIRLIARPRRARGERRTRSRGIAQGSCLSPLLANLVLNDVDHALNDAGYGYARFADDIVVCAPARDDLLAARELLGSLVAAHGLNLNEEKTAMTTFDEGFCFLGVDF

SEQ ID NO: 8608 - protein, 247 aa, synthetic construct
GVLQRQSKRIIENADEFLNQLSALLRNGTYEPEPLNRVDIPKGEHGKTRTLNIPTIHDRIVERAIVDTIAFTADLVQSSCSFAYRTGIGVDDAVHHVATLREEGYQYVLRTDIEDFFPHVNLEHALEALPESLQERDLLALLRIVALPRRAHGQRRARSRGVAQGSTLSPLLANLSLTRFDHDICDAGYGYARFADDIVVCSPREQDILDAIELLSDLAAAHGLKLNQDKTIMTTFDEGFCYLGVDF

SEQ ID NO: 8609 - protein, 144 aa, synthetic construct
RADIADCFEQIPRWPVVTRVKELVPDAEPCLLIQHLIARDATGPAARRVWSGRRRSRGLYQGSALSPALADLYLGAFGKAMLWAGRQVLRYADDFAIPAGSRTEAESALTTAEDVPAEWGPELNGAKSRIVSFDEGVDFLGRTV

SEQ ID NO: 8610 - protein, 250 aa, synthetic construct
GVKSTAVQEFEKGALRRLLDISEQLREGTYAPEPVTAFEVPKPSGEARLLGIGTVGDRVVERAVLAVIEPCIDPVLLPWSFAYRKGLGVPDAVQALAEARESGSTWVLRADFADCFETIPRWPVITRLHELVPDAELCLLVQHFIQRKSRGPGARRLRPGSGRGLHQGSALSPLLSNLYLDSFDRALLQRGRQVLRYGDDFAVPSESRHAAEQALAQATEAAREWGLELNAAKSQIVSFDEGVRFLGRTV

SEQ ID NO: 8611 - protein, 248 aa, synthetic construct
GQPDSEVDAFEANAARNLDELGTVLAAGEWQASPVRRVDLPKPSGGVRVLGVPRLVDRIVERALLRVLDPVIDPLLLPWSFAYRRGLGARDALAALAEARDSGMTWVARSDIRDCFPSIPQWEVLRRLREVVDDERIIHLVGVLLDRPVAGGRTDPKNRGLGLHQGSALSPLLSNLYLNAFDRAMLRAGFRVIRYSDDFAIPTTGRVAAEQALVSASTELEDLRLEINSGKSHVVSFDEGVRFLGEVT

SEQ ID NO: 8612 - protein, 210 aa, synthetic construct
TRVSIPKPDGGIRSLAIGAIEDRIVERAVLDVLDPVVDPTLSPWSFAYRRGLGVRDAVRALAEARESGLAFVVRCDIDDCFDSIPRWPLLRRLRELVSDAELVALVERLVGRPVTGERASGGRGLHQGGSLSPLLANLYLDTFDRALMRHGHRVVRYGDDIAISVPDRPTGLRVLDLADAEAEALSLRLNTDDRQVIAFDEGVPFCGQVV

SEQ ID NO: 8613 - protein, 243 aa, synthetic construct
GRVPVSVRRFERGVAASLVRLSGELSSGRYQPSRVSEVSLRTGSGSERVLRIGAVVDRVVERSLLNALTPVIDPLLSPFAFGFRRGLGVKDAVAALARARDEGSTHVLRSDIAAAFDSVPRARAVQALSRLVPDRRVCDVVASLLARLDDYGLEGVGIAQGSAVSPLLLNLYLLPFDEALMANGFTPLRYADDIAVPAMSESQAQSAAQDVAHQLECLGLACSAPKTSIRSFDEGVHFLGVTL

SEQ ID NO: 8614 - protein, 246 aa, synthetic construct
GNLAPSILKFQEDAEEKILRLSEALLDGSYKPYQFTEVDIETNGKERTLHIPAVQDRIVARAILATTTSRIDPLLGASAFGYRPGLGVADAVQAVVDAREAGLKWVLRTDVDDCFPSLSPDIAFDRFTQAVHDTDITDVVEQLLGRTVGNGKMRGTTLPGLPLGCPLSPVLMNLVLVDLDDALNAAGFTVVRYADDIVVVGESKEELEDAARFCQRILRSFNMQLGDDKTDIMTFDDGFAFLGEDF

SEQ ID NO: 8615 - protein, 176 aa, synthetic construct
AVLVPGPTRPDLPGQGVKVDQWSYTTLVDLTEGLRWVCRCDIDNCFPSIPKDRLRRKLTALFQGDPTLLGILTRLLARPAGGSPAEALPGLPQGSPLSPLWANLILADFDDAVARTGFPLVRYSDDMVIAAADRAEAWEAMRVAHDAAAGIEMSLGADKSAVMSFDEGFTFLGEDF

SEQ ID NO: 8616 - protein, 192 aa, synthetic construct
PDRIVARAILDTATPFVDPELGHCAFAYRPGLGVADAVQAIARQREEGLGWVLRTDIDECFPTLPVDLAHRRLAALVDDDDLASVLTALSARPYRTATRALRAVTGLPQGCPLSPVLANLVLVDVDRALLDRGYAPVRYGDDIAIPCANEDDAWEAARVTSEAAERLDMSLGSDKTHAMSFTEGFVFLGEEF

SEQ ID NO: 8617 - protein, 248 aa, synthetic construct
DQLSAGVRTFGDEADQRLAGLAEQLAGGMYLPGVLTELVMVTEDGGQRVLRVPAVRDRVVERALLSVLSPRLDPLLGPASFGFRPGLGVVDAVQALARLRDEGFGWVLRTDLHDCFPSVDLRRVRRLLEVLTSDGDLLGVLDLLLARAARRPGEQTLRPAHGLPQGSSLSPLLANLVLEDFDDRMRHAGFPLVRYADDIAVLASSEREAWEAARVASAAAKEIGMTLGADKTEIMSFDGGFCFLGEDF

SEQ ID NO: 8618 - protein, 241 aa, synthetic construct
GVERFAEDPKAELDELGEQLRTGTYRPRDLTEVVIDDGGGSRTLHIPAVRDRVVERSLLNVVTPWVDPVLGFTSYAYRPGLGVADAVQALVTLRSEGLGWVLRTDVDDCFPSVPVDHARRLLGALVPDADLLAIVDLLLARAAVRPGRGRGVMRGLAQGCALSPLLTNLVLTALDDALLDEGFAVLRYADDICVATETRDDAWEAARIATAALEVLGMELGADKTEVMSFDEGFSFLGEDF

SEQ ID NO: 8619 - protein, 239 aa, synthetic construct
ALDQAASKWDLGGGEVQSAARDLVKGTYQPQPCFRLDIPKSNGDRRQLAIPSRLDRVLQRSILDVIAPALELFFEESSFAYRRGLGRHTAARHLSQAFTDGYRWALHADFFDFFDTIDHKLLRRRLAAYLADPSLVEVIMRWVETGAPHPDHGIPTGAPLSPILANLFLDQFDEAMHSVGRRLVRYADDFVVLFRDQSEAQAVISEVRQAAESLRLELNRDKTHTLHLATSFDFLGLHF

SEQ ID NO: 8620 - protein, 249 aa, synthetic construct
IEKKPTIDKLTERTHSQINSALGQIIKQDYNAPAMQGFTIPKKDGSERLLAVSPLYDRVLQKAAAIILTPGLDALMAQGSYGYRKGLSRQQVRYEIQNAYRQGYHWVYESDIEDFFDAVNRKQLLNRLQSLFGKDPIWKQLEDWLGQEIHYQETIVERTPHTGLPQGSPLSPVLANFVLDDFDSDMELHGFKMIRFADDFIILCKSRHEAELAALGVQHSLKQVSLDINRDKTHIVELSQGFRFLGYLF

SEQ ID NO: 8621 - protein, 247 aa, synthetic construct
DTDEEHHDAIDELLTKLYVSRERIFKREFTPSQLHSVEIEKPEGGTRLLSVPNWHDRTLQKAVTECLGNTLEHIWMKHSYGYRKGHSRLQARDQINQYIQQGYEWVLESDIESFFDSVNWLNLEQRLKLLLPNEPLVPLLMQWVSAAKQTEDEQTLARHNGLPQGAPISPILANLLLDDLDQDMIAKGHQIVRYADDFVLLFKSKAAAESALDDIITALKEHHLAINLEKTRIVEASQGFRYLGYLF

SEQ ID NO: 8622 - protein, 245 aa, synthetic construct
SFNITATEFRTTLYQQLAAIRACRYHPHPLVPVTIAKKDGTDRFLAVPPVGDRALQRVVTAQLSAELDPLFIQHSFGYRKGYSRQGARDAINQAIRAGYGWILESDIDSFFDSVAWSQMATRLRLFMGQDPLVDLIMQWLQTPVQETPAASAPAPRCAGLPQGAPISPLLANLLLDDFDQDMIVQGMKLVRFADDFVLLFKHQQQAQQALPRVVQSLAEHGLALKPEKTRIVSAQQGFRYLGYLF

SEQ ID NO: 8623 - protein, 248 aa, synthetic construct
SLDSQFSEQERNQYKNKVIGLSHTILAGDYKAPVLTQVEIDKSDGGVRTLSIPPLADRILQKAIARPLAVSLDGLWKTHSYGYRKDLSRHDAKFAINQAIQQGYEWVLESDVDSFFDNVDWRNLQTRLKLLLPNDFLVDVIMAWVKAPVKTPSGQILERTQGLPQGSPLSPLLANLVLDDFDADMLALDYKLIRYADDFVLLFKKQSEAQMALDHVIASLNEHGLNIKAKKTQIVHANKGFRYLGFWF

SEQ ID NO: 8624 - protein, 248 aa, synthetic construct
SLDNPLSEQQQREVLQSVMTGSECLIHQRYPVPTLQQVEIEKEEGGTRTLSIPPLIDRILQKAVARPLAASLEGLWKSHSYGYRSGLSRHDAKLAINQAIQNGYEWILESDVESFFDNVDWHNLETRLTLLLPNDALVDTIMAWVKAPIKTVTGEYQQRQQGLPQGSPLSPLLANLILDDFDADMLALDYQLVRYADDFVLLFKTEQQAQAALHRVIDSLNEHGLKIKAQKTHIVHAKTGFRYLGFWF

SEQ ID NO: 8625 - protein, 242 aa, synthetic construct
SETQKQHTLTQLRQQCAQLLEGTFTAPTLQQVDIDKDDGGTRTLSIPPWQDRVLQKAVASLLNEAFDPLWKHQSYGYRKGRSRFNAKDAINDAIRQGYEWALESDVDSFFDSVCWTNLAARLHLLFPSDPLVPVIMNWVKAPIRTPDGDEIPRTQGLPQGSPLSPLLANLILDDFDGDMLALDYQLVRYADDFVLLFTSQQQAQQALPHVIASLNEHGLTLKARKTHIVEAKKGFRYLGFLF

SEQ ID NO: 8626 - protein, 255 aa, synthetic construct
ECDLSQYECNEETDAEGDQAELPPTLLKRANALAQGRYDVPPLRGVIIPKTDGEWRALAVAPFFDAVLQRAVAQILAPSLDRVMDNRSYGYRRGRSRLDAKEQIQLAYRNGARWVLEADIEDFFDSVAFSLVAQRLRALFHQDPINEAILAWLSAPVDYDGLRLQRKAGLPQGSPLSPVLANLLLDDFDSDMRKAGFNCLRFADDFVVVCQSREEAERAWQRAASSLNEHGLFLAENKTRVISFERGFRFLGYLF

SEQ ID NO: 8627 - protein, 261 aa, synthetic construct
GVEWIDADEQEPDAQDGAEAEADELAAPIEDLTRAIGHLQEGKYRVPELRGYLLPKRDGGLRPLAVPPLRDRVLQRAVQQTLGRGIEPLFSSGSHGYRPGHSRITAADAIRAAWAQGYRWVYESDVRDFFDSVDLQRLRERLEAIYGDDPVVAAVLGWMRAPVRFRGERIERRNGLPQGSPLSPLMANLMLDDFDSDMQAAGFRLIRFADDFIVLCKDPEEARRAGEAARASLAEQGLALHPDKTRITAMEDGFRYLGYLF

SEQ ID NO: 8628 - protein, 252 aa, synthetic construct
PIDPDDPESMPDPEAEEALADRLEAIGERLRAMRYQAPALKGVVIRDPDGDLRALAIPPFWDRVAQRAVNDCITPACDLLMSEASHGYRRGRSRHTASLDINRAWQDGYRWVYEADIEDFFDSVDWDKLRLRLEALYRDDPVIDLILAWMAAVVDYQGFSVQRSMGLPQGAPLSPTMANLMLDDLDNDLEQAGFRLVRYADDFVVLCRDRAQAEAAGQEVRRSLAELGLQLNDAKSRVVSFQQGFRFLGFVF

SEQ ID NO: 8629 - protein, 254 aa, synthetic construct
GGELWDTEYPEAPDPDEEEELADRLERLGKRLLEGDYRPPALRGVVYRDPDGDLRGLAIPPFWDRVAQRALVERIAPALEGVFSAASHGYRPGLSRHTASSAIQRAWREGYRWVYEADIEGFFDNLDWQRLAERLRALYRDDPAVDLLLAWMAAPVDYQGMRIERSRGLPQGAPLSPVLANLMLDDLDSDLEHAGFRLVRYADDFVVLCKDQERARAAGEAVRRSLAELGLILNESKSRSVSFEQGFRYLGFLF

SEQ ID NO: 8630 - protein, 127 aa, synthetic construct
GQSIAAFAAKGAAAIARLSGLLRNGNYAPRPLRLHEIPKPDGGTRRLAIPAVSDRIVQTAVAAALTPGSSRCFPPTATATAPAVRWRWRWTGSRPCGGWATPGWSRPISKRPLTGSRMTRCSRRSIP

SEQ ID NO: 8631 - protein, 249 aa, synthetic construct
ESKKLPKKLHQSLPHEDFDQLYEQLHQGNYQTGLLTPRLLEKPGQKRRLLLLPPFIDKVAHKCLSRWLATSLDTLYSANSYGYRKGYSRLTAKDRISYLLSQGYKWVVDADIKAFFASIDRQQVAARLQALYGDDTLWPILDKMLNAAIDPNSELPLELSISGLNLGNSLSPILANLMLDHFDDVIREHKLELVRYADDFLILCREQQQANHAKDFVEQLLHSQALSLNPRKTRVTHVNKGFRFLGYLF

SEQ ID NO: 8632 - protein, 246 aa, synthetic construct
DEQQALEQQRSDLPEMLQQVLHHDYWPAPLTPWLMQEQGRKERLILLAEFNDKVLHKTISLWLGASLDQLYSKTSYGYRKGYSRLSAKDRIINRIRAGYVYAVDADIRDFFPSVEQSRVLNRLSALYGADPLWTLVERFLSAPIRRQHLPAGYEDYERTGLDLGNSLSPVLANLMLDHLDAVMESLGYELIRYADDFLVLTKSRDKAQQALHMIEEILTAQGFALNHEKTRIRHFSEGIHFLGYLF

SEQ ID NO: 8633 - protein, 247 aa, synthetic construct
TDEHKAWEQSRENLPDTLYRCWHLDYWPELLHPRLLQQAGKKERLLLLPPFPDKVIHKTISRWLSDSLDQLYSKSSYGYRKGYSRLGAKDRIIHLVRKGYKYALDADITDFFPSVNTNRILGRLAALYGQDPLWQLLERFLHCQIDRQNLPAGYEHHVNQGLNLGTSLSPVLANLMLDHLDSVLNNMDYELVRYADDFLVLCKHKQQAEDARVLIEQLLKQHDLQLNAEKTKVRSFASGIYFLGYLF

SEQ ID NO: 8634 - protein, 247 aa, synthetic construct
GVDGITTDLFVGVANEQLAQMHRQLRREVYEASPAKGFYVPKKNGGQRLIALSTVRDRILQRYLLQSIYPRLEKAFTDSTFAYRPGLSIYGAVDRVMAIYAPQPTWVIKADIQQFFDNLSWGVLLSQLERLKVAPAQVRLIEQQLKAGLILQGQFYRPNKGVLQGGILSGALANLYLSEFDRLCQEAEIPLVRYGDDCVAVCHSYLQANRFLAMMQGWLEDIYLTLNPDKTRIVGPDEGFVFLGHMF

SEQ ID NO: 8635 - protein, 247 aa, synthetic construct
GVDGITVDLFKGIAQEQIRLLHQQMRQERYVASPAKGFYLPKKTGGDRLIGIPTVKDRIVQRYLLQGIYPHLENTFSEATFAYRPGLSIYTAVAQVMTRYRHQPAWVIKADIQQFFDRLSWPLLLHQLDQLPLPPVWMRWIEQQLKAGIVIRGHFQRPNQGVLQGSILSGALANLYLNDFDRRCLAADIDLVRYGDDCVAVCQSYLEATRSLALMQDWIEDLYLSLHPEKTQIIPPGEAFVFLGHRF

SEQ ID NO: 8636 - protein, 247 aa, synthetic construct
GIDGIPTDLFAGVVDEELSLLQRQLQQEYYQADPAKGFYRQKKSGGNRLIGIPTVRDRIVQRLLLHSIYPALEDVFSDRSYAYRPGLGVQSAIAHLSEVYAGQTVWTIKADVSRFFDSLNWALLLTRLERLSLEPVIVRMIEQQIKSGIVIDGQKLRQTKGVLQGGILSGALANLYLSDFDARCVGLNLDLVRYGDDFVIVTSGLLEATRVLDSLHHWLADIYLALQPEKTRIIAPDGEFTFLGYQF

SEQ ID NO: 8637 - protein, 210 aa, synthetic construct
GFYRVKKSGGHRLIGIPTVRDRIVQRLLLRSLYPILEETFQDCSFAYRPGVGVKHAIERVAEVYSSQTWTIKADISQFFDSLCRTLLLSQLEELSVDQTVVRYIKGQLEAGIVVGGMPILSGRGVLQGGILSGALANLYLSEFDRRCLDAGAYLTRYGDDFVIVARSLLEATRFLNLIEDWLSDIYLTLQPEKTHIFAPGEEFVFLGYGF

SEQ ID NO: 8638 - protein, 244 aa, synthetic construct
GITTDLFAGVKKDELIRLQQELIEEIYQPYPARGFYLPKNNGDKRLLGIPAVRDRVVQRWLLEDLYLPLEEVFTDCSYAYRPGRGIQMAVKHLYYYYQIQPKWIIKSDIRSFFDSLNWSILLSILEHLKLDPIIQQLVEQQLKSGIVLKGRYFPRNQGVLQGAVLSGALANLYLSEFDRKCLEKGINLVRYGDDFVAACQSLGEAERTLNLITQWLERIYLQLHPKKTEIYAPDQEFTFLGYLF

SEQ ID NO: 8639 - protein, 247 aa, synthetic construct
GIDNITVDLFAGVARYQLQVLLWQLQQENYFPRPAKGFYLRKASGGKRLIGIPTVRDRIVQRFLLDELYWPLEDVFLDCSYAYRPGRGIQMAVKHLYSYYQFGQAWVIKADIEKFFDNLCWPLLLTDLEKLQFEPTLRQLIEQHLASGIVVKGQHFHPNQGVLQGGILSGALANLYLNEFDRLCLSHGFNLVRFGDDFAVACADSIQANRCLEQINSWLGSFYLKLQPEKTRIFAPDEEFTFLGYLF

SEQ ID NO: 8640 - protein, 244 aa, synthetic construct
GITTDLFAGVAKEQLYSLQRQLQQEHYAAHPALGFYLRKTRGGKRLIGIPVVLDRIVQRLLLEELYLPLEDTFLDCSYAYRPGRGIQMAVQHLESYYQFQPTWVIKADIAQFFDNLCHALLFTHLEQLQLEPIVLQLIEQQLKAGIVIKGQRLFPQKGVLQGAVLSGALANLYLTEFDRQCLSHGLNLVRYGDDFVVVAPDWIQANRALEQITTGLAQLYLTLQPEKTKIFAPDEEFTFLGYQF

SEQ ID NO: 8641 - protein, 244 aa, synthetic construct
GISIGFFESMATEQLRNLVSQLQYGTYTASPAKGFYVPKKNGGKRLIGIPTVRDRIIQRLLLDELYFPLEDTFVDCSYAYRPGRNIQQAVQHLYRYYQYQPKWIIKADIVEFFDNICLALLLNALEKLRLEPNILQLIEQQIKSGIIINGQYQNAGKGLLQGGTLSGALANLYLTDFDQKCLNQGINLVRYGDDFVIACSNFAEANRVLDKITGWLGGVYLTLKAEKTEIFSPDDEFTFLGYRF

SEQ ID NO: 8642 - protein, 244 aa, synthetic construct
GISVDLFESMATEQLQNIAYQLKEETYTANPAKGFYIPKKNGTKRLIGIHTVRDRIIQRLLLDELYFPLEDTFLDCSYAYRPGHSIQQAVQHLYGYYQYQPKWIIKADVADFFDNLSWALLLTYLEELSLEPSLLQLLEQQLKSGIIIAGQYRNFGKGVLQGGILSGALANLYLTSFDRKCLSQGINLVRYGDDFVIACNSWLEANRILDKITGWLGEVYLTLQPEKTQIFTPNDEFTFLGYRF

SEQ ID NO: 8643 - protein, 244 aa, synthetic construct
GISVELFESMATEQLQNIANQLYDETYTASPAKGFYIPKKNGSKRLIGIPTVRDRIIQRLLLDELYFPLEDTFLDCSYAYRPGHNIHQAVQHLYGYYQYQPKWIIKTDIADFFDNLSWALLLTALDELSLEPIVLCLLEQQLHSGIIIAGQYRNFGKGVLQGGILSGALANLYLTNFDRKCLSQSINLVRYGDDFVIACNSWQEANRILDKITTWLGEVYLTLQPEKTQIFTPNEEFTFLGYRF

SEQ ID NO: 8644 - protein, 247 aa, synthetic construct
GVDGISLDLFESVAAEQLRNIEYQLHHETYTASPAKGFYVPKKNGDKRLIGIPTVRDRIVQRLLLEELYFPLEDTFLDCSYAYRPGRNIQQAVQHLYSYYQLQPKWVIKADIAEFFDNLCWALLLTALEDLQLESIVLQLLEGQLKSGIVIAGKPVYPGKGVLQGGVLSGALANLYLTNFDRKCLSHGINLVRYGDDFAIACTSFHEANRILDKITTWLGELYLQLQPEKTQIYAPDDEFIFLGYRF

SEQ ID NO: 8645 - protein, 247 aa, synthetic construct
GVDGIDVDLFASAVNDQLRILLRQLQQESYCASPAKGFYLAKSSGGKRLVGIPTVRDRIVQRLLLEELYFPLEDTFLDCSYAYRPGRNIQQAVQHLYSYYHLRPKWIIKADIAEFFDSLSWALLLTALEKLPLEPIVVQLLEGQLRSGIVINGKPIYPGKGVLQGGVLSGALANLYLNEFDKKCLHQGINLVRYGDDFAIACSNWREATRTLDKVAAWLGELYLNLQPEKTQIFAPDDEFTFLGYRF

SEQ ID NO: 8646 - protein, 247 aa, synthetic construct
GVDGMTVDLFAAGVNEQLRILLRQLQQESYRASPAKGFFVAKKSGGKRLIGIPTVRDRIVQRLLLEELYFPLEDTFLDCSYAYRPGRNIQQAVQHLYSYYQYQPKWIIKADIAEFFDNLCWALLFTALEDLQLEPILLQLLEQQLKSGIVIAGKPIYPGKGVLQGGVLSGALANLYLTSFERKCLSYGINLVRYGDDFAIACSSWLEANRILDKITTWLGELYLNLQPEKTQIFAPDDEFTFLGYRF

SEQ ID NO: 8647 - protein, 244 aa, synthetic construct
GISVDLFAASVDEQLTILLRQLQQESYHPSPAKGFYLTKKTGGKRLVGIPTVQDRIVQRLLLEELYFPLEETFVDCSYAYRPGRNIQQAVQQLFSYYQYHPTWIIKADIAQFFDNLCWALLLTNLEALQLESRILQLLEQQLKAGIIIAGKHINFGKGVLQGGIISGALANLYLTIFDRKCLSNGINLVRYGDDFAVACSSWKEANRILDKIIAWLGELYLTLQPEKTQIFAPNEELKFLGYRF

SEQ ID NO: 8648 - protein, 247 aa, synthetic construct
GVDGITVDLFAASADQQLRIILRQLQQKSYRASPAKGFYLTKKSGGKRLIGISTVRDRIVQRLLLEELYLPLEDTFVDCSYAYRPGCNIQQAVQRLFSYYQYHPTWIIKADIAQFFDNLSWALLFTGLETLHLEAIVLELLEQQIKSGIVLGGKYINFGKGVLQGGILSGALANLYLTAFDRKCLSHGINLVRYGDDFAVACSSWTEANRILDKITTWLGGLYLTLQPEKTQVFAPHEEFTFLGYRF

SEQ ID NO: 8649 - protein, 250 aa, synthetic construct
GVDCQSIASFESELQLGLNSILYDLRQQHYTPAALKRSQLKLPGKKPRWLAFPTVRDRIVHTAIAILLQPYFEEEFEHNSYGYRPGRSYIMAVDKVIEHRNQRRRHVFDADIQGYFDHIPQDKLLTKLQATAIDPTLIELIFTLLFSFQQSNDGLVFGKALGQGIPQGSAICPLLANFYLDELDEHLNALGYHMVRYADDFVVCCDSAKAAQHAQYHTEQVLTHLALTLNLNKTQLTTFADGFKFLGHYF

SEQ ID NO: 8650 - protein, 249 aa, synthetic construct
GADGISIKEFASDLDTQLRQLHYDWKNNRYKPYRYRNITIEKANKKPRELAVPTVRDRILHSALAQKLLNIFEAEFEHISYGYRPNRSYTHAIRHIEQLRDQGYSTVIDADIQGYFDNICHIKLTELLNRHLPSDWVSAITDTLLSQQQADGHLYFGAEIGVGIPQGSPLSPLLANLYLDGFDEALLDRGEQIIRYADDFVILLPNEDRAQSCLAFVTDYLNQLKLTLNCEKTKVVSFQDGFTFLGVTF

SEQ ID NO: 8651 - protein, 246 aa, synthetic construct
GVTIQTFAIHLDTNLNTLLSAWNHGNYAPSPYRPLTIQPNEKKTRQLAIPTVADRIIHTAIAQKLVAKFEPEFEHISYGYRPNRSYTHAIRHIEQLRNQGYLYVLDADIKGYFDHICHKRLKQILQKYLEDNWVESIMTLLLSQQMPAQTLLFGVELGRGIPQGSPLSPLLANLYLDGFDEALLDRGEQIVRYADDFVVLVTHEQQAQHCLAFVTQYLASLKLQLNTEKTRVVSFQDGFTFLGVSF

SEQ ID NO: 8652 - protein, 361 aa, synthetic construct
GPDAVTILDFEAAWVDHMQQLAMELQSQIYRPLPPRRLFLDKRDGGKRSIAILAVRDRIAQRAVLQILEPEIEPTFLDCSYGFRPYVGVPHALTRIERYRQQGLQWVAHADISDCFGTIDHQILLSQLHQRISDRAVVELIGQWLSVGVMEDAATTEASNWWDDGEDLLERLAKHGEDLLWPNQYPQAGPSYAPQMLDFEANRTDSLRKRALQGLASNAALWGITHSKRVISGLRSLAPLFKQVPGGSLTWGAAGIATLALIPLSQRLLRQHERGTLQGGAISPMLANIYLDSFDRAMTERGHILVRFADDFVLLGAHQAAVEQALADATNVLKRLRLATKESKTGVQHFNDGLTFLGHRF

SEQ ID NO: 8653 - protein, 249 aa, synthetic construct
GADEQTLAEFAADAEAQLGLLALQLTQGSYRPAPARLIPVAKPGGGVRELLLPAVRDRIVQSALARYLADLLEPDFGEASHAYRPGHSVATALHRLQALRDGGLVFVAVCDIHHFFDSVDHRRLFSLLDDLPLERRLREQMKTCVRIEVADVQGQGAWSLARGLAQGSPLSPVLANLFLMAFDAACARAGLALVRYADDCVLACASETEAQSALAFAADALENIGLALNTRKSRLASFAEGFEFLGAFC

SEQ ID NO: 8654 - protein, 352 aa, synthetic construct
GIDQITLHDFAADWPNQMVRLAEELRDGSYRPLPPRRVAIAKASGGERAIAILTIRDRIAQRAVQQVLTPLFEPLFLDCSYGSRLAVGVPEAIERVVRYTEQGLIWVIDGDIRAYFDSIDHGILLGLLRQRIDEPAILHLIAQWLAVGSVHTETPDETLPDSPLVALLRRSGELIHEALNAPSDPLPTAYDYPDLSRPASPHSGIPTGLFAALSLAQPAFEIARQLTPLLKRIGAQRLAVGGALAVGTVLLSELVHRAQASHDRRGTLQGGPLSPLLANIYLHPFDLAMTAHGARMVRFVDDFVVMCPDRTTAEHTLVLVERQLATLRLTLNPQKTRIVAYAGGIEFLGQAL

SEQ ID NO: 8655 - protein, 362 aa, synthetic construct
GLDAVTLRDFEVDWTRQMAQLADELQQGTYRPLPAKRVAIPKASGGERAIAILAVRDRVAQRAVQQVLDPLFDPCFLDCSYGCRPYVGVPDAIARVQRYADQGLGWVVDADIATCFDSLDQRVLLSLVRQRIDELPVLKLIAQWLEAGVLQGEAALPGDTPPTPLQRGEAAVRRALSWGAERLHPPPPVGPYAAAMWETPGGSIGEDGWAPRQPGLESHLWTAVMLARPVIDGARQALPYLQRIGGRRLAVAGAVAVGALALSEAAARLRHASRRGVPQGGALSPLLANIYLHPFDVAMMGQGLRLVRFMDDFVVMCATQEEAECALQFAQRQLHILRLTLNAEKTHITAYADGIEFLGAAL

SEQ ID NO: 8656 - protein, 245 aa, synthetic construct
GADGVTIERYEGNLDLNLRIMRKELTEQTYFPLPLLRILVDKGNGEARALCIPSVRDRIVQAAVLQLIEPVLEKEFEECSFAYRKGRSVKQAVYKVREYYEQGYQWVVDADIDAFFDSVDYSLLLLKFKCYIHDPCIQNLVGLWLKGEVWDGKTVTTLKKGIPQGSPISPILANLYLDEFDEELTRNGYKLVRFSDDFIILCKNSGMAKESLKLTKKILEKLLLELDEEQVINFDQGFKFLGVIF

SEQ ID NO: 8657 - protein, 247 aa, synthetic construct
GVDYQTLAAFADRLHKNLETLRDEVNYETYQPQPLLRIELEKPGGGTRPLSIPTVRDRILQTAVTRVIEPLFEAEFEDCSFAYRKGRSVDQALDRIQLLQRQGYHWVVDADIQCFFDSIDHTLLMTMVGKLVTDVGLLRLIEQWLCATVVDGDRRFVLSKGVAQGSPIGPLLSNLYLHHLDEALLDNNLCLIRFADDFLILCKSQDHAEQALELTDSLLGELRLTLNTRKTQIVHFNQGFRFLGVQF

SEQ ID NO: 8658 - protein, 248 aa, synthetic construct
GYDKQSITDYSWRIEEHLADLGRQLLTNTYEPQPLLKLVMLKPTGKLRTLLIPTVMERVAQTAAAIVLTPLVESELGANTFAYRPGLSRMTAAREIERLRNLGYNWVVDADISSFFDTVDHPLLFQRFRELCDDEELLTLIARWLTAEIVDGQNPKVKNTIGLPQGCPISPMLANLYLDKFDERMEQEGFKLVRFADDFLILCKSKPKAEAALQLSESALAELKLQLNNEKTRITTFAEGFKYLGYLF

SEQ ID NO: 8659 - protein, 248 aa, synthetic construct
GWDNTSIQDYSLRLEENLKSLSHALLTGTYRQSPLLKLVMLKPDGKERVLLIPGVIDRVAQTAASIVLSPIIEAELGNCTFAYRPGISREGAAREIDRLHREGYQWVLDADIRNFFDNVRHDLLFQRLVELVDDKEMISLLHRWLTAEIVDGLNPRTRNTMGLPQGCPISPALANLYLDRFDETMEQQGFKLVRFADDYLVLCKTRPKAEAALKLSESALAELKLELHSDKTRITTFAEGFKYLGYLF

SEQ ID NO: 8660 - protein, 247 aa, synthetic construct
GCDGEEVEQFAQGLLGRLHTLQAEVADGRYVARPLRVVALPKPSGGQRLLAIPGVRDRVLQAAMAHALGRRIEPTLDEASHAYRPGRSVLGALAALLALRDQGRSTVLKADVASFFDRIHQPTLLAQLRRFSADPGLLALVGQVLAAVLDDDGERRLMTRGVPQGSPLSPLLANLYLHPFDVGMRAQGFQLIRYADDLVLACLDADEAARAQDAAARALRELHLELNPAKTRIASFVSGFDFLGVRF

SEQ ID NO: 8661 - protein, 220 aa, synthetic construct
GGDGEGVATFQAGLDLRLARLAADLLGGTYRPGPWLIAGGAVVAPVADRVVMTAVATGLPDPSSDGDPAAVMARLAALGQQGAVHLLDGTITHVTDLVPHDLLCERLAALGGDARLVDLFGMWLAVADPEDGLGIPPGLPVSGLLARLHLGAVAARIAAAGVHLVPAAGEILVLATGAAAAEDARGRMLALLADHGLYVDVDLPRMIRLDQAGPRLGRIM

SEQ ID NO: 8662 - protein, 247 aa, synthetic construct
GVDRESVVHFAKNSEAYLSQLRRSLASGYYHPMPLRQLFIPKKAGGWRELGVPTVRDRIVQHALLNILHPLLEPQFEACSFAYRPGRSHLSAVRQIAQWRDRGYEWVLDADVVRYFENILWQRLLDEVAERLAAPEVLSLISAWLSVGVLSKEGLMFPQKGISQGSAISPILANVYLDDFDEIVTATGLKLVRYADDFVVMSRSQKRIVEAKDEVADLMNGIGLQLHPDKTRIVDFDRGFRFLGHAF

SEQ ID NO: 8663 - protein, 201 aa, synthetic construct
RVPTVRDRIVQQALLNVLHPVLEPQFEPVSFAYRPGRSHKLAVEKVSAWHRRGYDWLLDGDIVSYFDQVEHSRLLSEVDERLGASDFETLALRLIEQWNTVGTLTSAGLVLPERGIPQGSVVSPILANVYLDDFDEALQASRFKLVRFADDFVVMGRSQRQAEQAQAKVAELLTTMGLQLHPDKTQITNFDRGFRFLGHAF

SEQ ID NO: 8664 - protein, 247 aa, synthetic construct
GVDGETIYAFGLHKSRNLTRLLQQVATSTYRPLPLRQFFIPKKSGGWRELGVPTVRDRIVQQALLQVLHPVFEVEFEPQSYAYRPGRSHRMAVERVAHWRSRGYDWVLDADIVKYFDTLQHPRLLAEVKERLNQPWVLALLQGWITAGTLTREGILLPTCGVPQGSPISPLLANVYLDDFDELLTQAGHKLVRYADDFVVLARTQQRLVEAQTYVAQLLEGMGLSLHPNKTQITTFDRGFRFLGHAF

SEQ ID NO: 8665 - protein, 203 aa, synthetic construct
RIPAVADRIVQQALLNVLYPILEPEFEVCSFAYRPGRSHRMAVDQIHAFSRRGYRWVMEADIFDYFDHIGHRRLLAEVAERLPGQDPSFCDLVLQLVQQWIAVGVVTQSGLILPQAGIPQGAVIAPILANVYLDDFDEALLRTPLKLVRYADDFVILGQRERQVQKILPEVAQQMAEIGLQLNMSKTRITNFQKGFKFLGHIF

SEQ ID NO: 8666 - protein, 112 aa, synthetic construct
AIGHLVEQWIGSGVSTASGLILPNKGVPQGAVISPILANVYFDDFDEAIEAAGLKLVRYADDFVILAKSKARIERAYNLVASLLHAMGLELHPDKTRVTTFNEGFRFLGHTF

SEQ ID NO: 8667 - protein, 157 aa, synthetic construct
AVDRISALRRMGYTWVVEADIEKAFDRIPHDPVLEALDTALDPAPGTRALIDLVGLWLAHGSGQLGTPGRGLAQGSPLSPLLSNLFFDGLDDRFDSGAARIVRFADDFVILARSEAGAEEARALAEEFVAGHGLRMVSRETRVVGFDRGFQFLGQLF

SEQ ID NO: 8668 - protein, 240 aa, synthetic construct
GGDGQTLAQFQRTVLLHLHRLGDDVRAGLYMPGPHRVVSIPKRAGGWRSLSIPCVRDRVLQTAVAQRLQPILEPEFEPESYGYRPGRSVAQAIARVATLRRQGFRWTVDADIERFFDCVPHGPLLERLRPFLGDPGLVGLVEMWLAGAGPHGRGLPQGSPISPLLANLYLDDVDEGLKSTHTRLVRFADDFVILTRNEDEALQALERARGLLDKLGLSLNLEKTRIVPFEGGLDFLGRKF

SEQ ID NO: 8669 - protein, 240 aa, synthetic construct
GGDGVTIDAFDAIAEPRLQALHAALASGGYWPAPARVIEAKKPSGGTRTLRIPAIVDRVVQTAAALVLTPILDREFEDASFGYRPGRSVGQAVARVAYLRNAGYVWTVDGDIRAFFDEVPHAPLLDRVDRVLGCARTADLVERWLQVYCDGGRGLPQGMPLSPVLSNLYLDSIDEKIEKGGVRLVRFADDFLLLCRSEAVAEGALARMTGILREAGLKIHPEKTAIRRFEDATRFLGHMF

SEQ ID NO: 8670 - protein, 244 aa, synthetic construct
GESLDAFHIGVEPRLARLAADVRGGTYRPGPYRLLDVPKDDGGTRRLAIPCVADRVLMTSAALVMGPMLDATFEPSSHGYRPGRGVRTAIARVESLRDQGFHWVLDADITRFFDRVPHDRLLDRLQQATGDARLVDLVGLWLDGYDREGEAGRGDGLGLPQGSPVSPLLANLYLDTVDERIAAAGLHLVRFADDFVILAADEAAAEGARAHVAALLADHGLHLHPDKTRVVSFDQGFAFLGKLF

SEQ ID NO: 8671 - protein, 237 aa, synthetic construct
RQTLDDFAESLERNLEGLHAALRSASYRPGPIRNVSIPKRDGSPRRLSIPSVADRVVQTALCQGLTPILEPEMEDASFAYRPGRSVQMAVERVGRYFRQGYHWVVDGDIDDYFDSIPHHGLMAVLRRYVDDQDVLGLIAQWLAHAHAGGVGVSQGSPLSPLLANIYLDDMDERIGRTGARLVRFADDFLLLCKSEERARESLAAMSALLAEYGLGLNPDKTRIVNFEQGFEFLGRLF

SEQ ID NO: 8672 - protein, 242 aa, synthetic construct
GGDGETIAHFARQAEFRLARLAHELQADLYRPGPLRQISVPKRKGEGMRVLSIPCVVDRIAQRATAAVLSAALEPQFSDASFGYRPGRSVAQAVARVDALRRQGFTWVVDADIKAFFDSVPHAPLAARLHAAGIEPQLIELIDLWLDSFSAEGVGLAQGSPISPVLANLHLDALDDSFGPRGSVRIVRFADDFVLLTRCRPGAEAALAKARDQLAEAGLRLNLAKTRIVPYDQALRFLGHLF

SEQ ID NO: 8673 - protein, 240 aa, synthetic construct
GGDGMTVARFALVAESMIQRLAGALRSGQYRPGPARRAFIPKKDGGLRPLDIPCVHDRVVQGAATLVLDPVLDKAFADSSFAYRRGRSVAQAVARIGSLRRQGFTHVVDGDIRAYFERIPHDRLITKLEQHVDDQAMVDLIWLWLETYSLTGRGVPQGAPISPLLANLYLDAVDDRIERAGVRLVRFADDFVLLAKTPASAEKALVEMTRLLAEEGLEIHPEKTRLVSFEEGFRFLGHVF

SEQ ID NO: 8674 - protein, 240 aa, synthetic construct
GGDGVPLARFLVNAPARIARLSAGLRDGSYAPGPLRRVDIPKKSGGTRPLAIPCVVDRIAQTAVMQALAPRLDEEFAESSFGYRLGRGVRDAVKRVAALRGKGHVYVVDADIAKFFESVPHDKLLERLAQSMTDGPLMRLIGLWIEHGGARGRGLPQGSPLSPLLANLYLDRLDDAFAKRGAHIVRFADDFVILAESRHGAEGALVRAEKLLAEHGLSLNREKTRVTSFDQGFRFLGHLF

SEQ ID NO: 8675 - protein, 248 aa, synthetic construct
GGDGVTIDRFARRAPQRLTALSGALLDGRYRPGDLRRIDLKKRDGGTRPLAIPSVIDRVAQTAAALVLTPILDPLFDEASFGYRPGRSVAMAVRRIDMLRRRGFCHVVEADIVRCFERIPHEPVLSSLAKTLAGRVGADRLVDLVALWLEHAAMFLETPGLGLAQGSPLSPLLSNLYLDRLDDALDRRDVAVVRFADDFVLLCRSREAAAKALNRAENLLEAHGLELHGDGTRIVDFDRGFEFLGHLF

SEQ ID NO: 8676 - protein, 237 aa, synthetic construct
GLTVGRFAEAAPSRLLALHRTLRMGDYRPGPLRRLSIPKPDGALRPLAIPPVTDRVAQTAAALVLTPLLDGEFEDASFGYRPGRSVPQAVARVARWRDQGYDWVVDADIERYFERVPHDRLLIRLERSIGAGPLTELIAVWLESGAENGVGLPQGSPLSPLLSNLYLDDLDEALDGRGLRLVRFADDFVLLCRSRERAERALDHAAAVLEEHGLRLNRDKTRIVPFDQGFRFLGHLF

SEQ ID NO: 8677 - protein, 237 aa, synthetic construct
GMTVEEFSIDLPTRLVRLQLALAQGTYRPGRLRRVDVAKEDGGTRPLAIPPVVDRVAQTAVAQVLTPLLDPRMHDGSFAYRPGRSVAMAVARVAEHRRQGFGWVVDGDIERYFERVPHERMMACLARVIDEPPLLDLIELWLESFSAMGLGLPQGAPLSPLLANLYLDDIDDRIAARGVRLVRFADDFLLMCRGEAAAEDARDRMAALLAEHGLRLHPDKTRIVPFEQGFRFLGHLF

SEQ ID NO: 8678 - protein, 1367 aa, synthetic construct
DKKYSIGLDIGTNSVGWAVITDEYKVPSKKFKVLGNTDRHSIKKNLIGALLFDSGETAEATRLKRTARRRYTRRKNRICYLQEIFSNEMAKVDDSFFHRLEESFLVEEDKKHERHPIFGNIVDEVAYHEKYPTIYHLRKKLVDSTDKADLRLIYLALAHMIKFRGHFLIEGDLNPDNSDVDKLFIQLVQTYNQLFEENPINASGVDAKAILSARLSKSRRLENLIAQLPGEKKNGLFGNLIALSLGLTPNFKSNFDLAEDAKLQLSKDTYDDDLDNLLAQIGDQYADLFLAAKNLSDAILLSDILRVNTEITKAPLSASMIKRYDEHHQDLTLLKALVRQQLPEKYKEIFFDQSKNGYAGYIDGGASQEEFYKFIKPILEKMDGTEELLVKLNREDLLRKQRTFDNGSIPHQIHLGELHAILRRQEDFYPFLKDNREKIEKILTFRIPYYVGPLARGNSRFAWMTRKSEETITPWNFEEVVDKGASAQSFIERMTNFDKNLPNEKVLPKHSLLYEYFTVYNELTKVKYVTEGMRKPAFLSGEQKKAIVDLLFKTNRKVTVKQLKEDYFKKIECFDSVEISGVEDRFNASLGTYHDLLKIIKDKDFLDNEENEDILEDIVLTLTLFEDREMIEERLKTYAHLFDDKVMKQLKRRRYTGWGRLSRKLINGIRDKQSGKTILDFLKSDGFANRNFMQLIHDDSLTFKEDIQKAQVSGQGDSLHEHIANLAGSPAIKKGILQTVKVVDELVKVMGRHKPENIVIEMARENQTTQKGQKNSRERMKRIEEGIKELGSQILKEHPVENTQLQNEKLYLYYLQNGRDMYVDQELDINRLSDYDVDHIVPQSFLKDDSIDNKVLTRSDKNRGKSDNVPSEEVVKKMKNYWRQLLNAKLITQRKFDNLTKAERGGLSELDKAGFIKRQLVETRQITKHVAQILDSRMNTKYDENDKLIREVKVITLKSKLVSDFRKDFQFYKVREINNYHHAHDAYLNAVVGTALIKKYPKLESEFVYGDYKVYDVRKMIAKSEQEIGKATAKYFFYSNIMNFFKTEITLANGEIRKRPLIETNGETGEIVWDKGRDFATVRKVLSMPQVNIVKKTEVQTGGFSKESILPKRNSDKLIARKKDWDPKKYGGFDSPTVAYSVLVVAKVEKGKSKKLKSVKELLGITIMERSSFEKNPIDFLEAKGYKEVKKDLIIKLPKYSLFELENGRKRMLASAGELQKGNELALPSKYVNFLYLASHYEKLKGSPEDNEQKQLFVEQHKHYLDEIIEQISEFSKRVILADANLDKVLSAYNKHRDKPIREQAENIIHLFTLTNLGAPAAFKYFDTTIDRKRYTSTKEVLDATLIHQSITGLYETRIDLSQLGGD

SEQ ID NO: 8679 - protein, 1053 aa, synthetic construct
NQKFILGLDIGITSVGYGLIDYETKNIIDAGVRLFPEANVENNEGRRSKRGSRRLKRRRIHRLERVKKLLEDYNLLDQSQIPQSTNPYAIRVKGLSEALSKDELVIALLHIAKRRGIHKIDVIDSNDDVGNELSTKEQLNKNSKLLKDKFVCQIQLERMNEGQVRGEKNRFKTADIIKEIIQLLNVQKNFHQLDENFINKYIELVEMRREYFEGPGKGSPYGWEGDPKAWYETLMGHCTYFPDELRSVKYAYSADLFNALNDLNNLVIQRDGLSKLEYHEKYHIIENVFKQKKKPTLKQIANEINVNPEDIKGYRITKSGKPQFTEFKLYHDLKSVLFDQSILENEDVLDQIAEILTIYQDKDSIKSKLTELDILLNEEDKENIAQLTGYTGTHRLSLKCIRLVLEEQWYSSRNQMEIFTHLNIKPKKINLTAANKIPKAMIDEFILSPVVKRTFGQAINLINKIIEKYGVPEDIIIELARENNSKDKQKFINEMQKKNENTRKRINEIIGKYGNQNAKRLVEKIRLHDEQEGKCLYSLESIPLEDLLNNPNHYEVDHIIPRSVSFDNSYHNKVLVKQSENSKKSNLTPYQYFNSGKSKLSYNQFKQHILNLSKSQDRISKKKKEYLLEERDINKFEVQKEFINRNLVDTRYATRELTNYLKAYFSANNMNVKVKTINGSFTDYLRKVWKFKKERNHGYKHHAEDALIIANADFLFKENKKLKAVNSVLEKPEIESKQLDIQVDSEDNYSEMFIIPKQVQDIKDFRNFKYSHRVDKKPNRQLINDTLYSTRKKDNSTYIVQTIKDIYAKDNTTLKKQFDKSPEKFLMYQHDPRTFEKLEVIMKQYANEKNPLAKYHEETGEYLTKYSKKNNGPIVKSLKYIGNKLGSHLDVTHQFKSSTKKLVKLSIKPYRFDVYLTDKGYKFITISYLDVLKKDNYYYIPEQKYDKLKLGKAIDKNAKFIASFYKNDLIKLDGEIYKIIGVNSDTRNMIELDLPDIRYKEYCELNNIKGEPRIKKTIGKKVNSIEKLTTDVLGNVFTNTQYTKPQLLFKRGN

SEQ ID NO: 8680 - protein, 1052 aa, synthetic construct
KRNYILGLDIGITSVGYGIIDYETRDVIDAGVRLFKEANVENNEGRRSKRGARRLKRRRRHRIQRVKKLLFDYNLLTDHSELSGINPYEARVKGLSQKLSEEEFSAALLHLAKRRGVHNVNEVEEDTGNELSTKEQISRNSKALEEKYVAELQLERLKKDGEVRGSINRFKTSDYVKEAKQLLKVQKAYHQLDQSFIDTYIDLLETRRTYYEGPGEGSPFGWKDIKEWYEMLMGHCTYFPEELRSVKYAYNADLYNALNDLNNLVITRDENEKLEYYEKFQIIENVFKQKKKPTLKQIAKEILVNEEDIKGYRVTSTGKPEFTNLKVYHDIKDITARKEIIENAELLDQIAKILTIYQSSEDIQEELTNLNSELTQEEIEQISNLKGYTGTHNLSLKAINLILDELWHTNDNQIAIFNRLKLVPKKVDLSQQKEIPTTLVDDFILSPVVKRSFIQSIKVINAIIKKYGLPNDIIIELAREKNSKDAQKMINEMQKRNRQTNERIEEIIRTTGKENAKYLIEKIKLHDMQEGKCLYSLEAIPLEDLLNNPFNYEVDHIIPRSVSFDNSFNNKVLVKQEENSKKGNRTPFQYLSSSDSKISYETFKKHILNLAKGKGRISKTKKEYLLEERDINRFSVQKDFINRNLVDTRYATRGLMNLLRSYFRVNNLDVKVKSINGGFTSFLRRKWKFKKERNKGYKHHAEDALIIANADFIFKEWKKLDKAKKVMENQMFEEKQAESMPEIETEQEYKEIFITPHQIKHIKDFKDYKYSHRVDKKPNRELINDTLYSTRKDDKGNTLIVNNLNGLYDKDNDKLKKLINKSPEKLLMYHHDPQTYQKLKLIMEQYGDEKNPLYKYYEETGNYLTKYSKKDNGPVIKKIKYYGNKLNAHLDITDDYPNSRNKVVKLSLKPYRFDVYLDNGVYKFVTVKNLDVIKKENYYEVNSKCYEEAKKLKKISNQAEFIASFYNNDLIKINGELYRVIGVNNDLLNRIEVNMIDITYREYLENMNDKRPPRIIKTIASKTQSIKKYSTDILGNLYEVKSKKHPQIIKKG

SEQ ID NO: 8681 - protein, 1367 aa, synthetic construct
DKKYSIGLDIGTNSVGWAVITDEYKVPSKKFKVLGNTDRHSIKKNLIGALLFDSGETAEATRLKRTARRRYTRRKNRICYLQEIFSNEMAKVDDSFFHRLEESFLVEEDKKHERHPIFGNIVDEVAYHEKYPTIYHLRKKLVDSTDKADLRLIYLALAHMIKFRGHFLIEGDLNPDNSDVDKLFIQLVQTYNQLFEENPINASGVDAKAILSARLSKSRRLENLIAQLPGEKKNGLFGNLIALSLGLTPNFKSNFDLAEDAKLQLSKDTYDDDLDNLLAQIGDQYADLFLAAKNLSDAILLSDILRVNTEITKAPLSASMIKRYDEHHQDLTLLKALVRQQLPEKYKEIFFDQSKNGYAGYIDGGASQEEFYKFIKPILEKMDGTEELLVKLNREDLLRKQRTFDNGSIPHQIHLGELHAILRRQEDFYPFLKDNREKIEKILTFRIPYYVGPLARGNSRFAWMTRKSEETITPWNFEEVVDKGASAQSFIERMTNFDKNLPNEKVLPKHSLLYEYFTVYNELTKVKYVTEGMRKPAFLSGEQKKAIVDLLFKTNRKVTVKQLKEDYFKKIECFDSVEISGVEDRFNASLGTYHDLLKIIKDKDFLDNEENEDILEDIVLTLTLFEDREMIEERLKTYAHLFDDKVMKQLKRRRYTGWGRLSRKLINGIRDKQSGKTILDFLKSDGFANRNFMQLIHDDSLTFKEDIQKAQVSGQGDSLHEHIANLAGSPAIKKGILQTVKVVDELVKVMGRHKPENIVIEMARENQTTQKGQKNSRERMKRIEEGIKELGSQILKEHPVENTQLQNEKLYLYYLQNGRDMYVDQELDINRLSDYDVDHIVPQSFLKDDSIDNKVLTRSDKNRGKSDNVPSEEVVKKMKNYWRQLLNAKLITQRKFDNLTKAERGGLSELDKAGFIKRQLVETRQITKHVAQILDSRMNTKYDENDKLIREVKVITLKSKLVSDFRKDFQFYKVREINNYHHAHDAYLNAVVGTALIKKYPKLESEFVYGDYKVYDVRKMIAKSEQEIGKATAKYFFYSNIMNFFKTEITLANGEIRKRPLIETNGETGEIVWDKGRDFATVRKVLSMPQVNIVKKTEVQTGGFSKESIRPKRNSDKLIARKKDWDPKKYGGFVSPTVAYSVLVVAKVEKGKSKKLKSVKELLGITIMERSSFEKNPIDFLEAKGYKEVKKDLIIKLPKYSLFELENGRKRMLASARFLQKGNELALPSKYVNFLYLASHYEKLKGSPEDNEQKQLFVEQHKHYLDEIIEQISEFSKRVILADANLDKVLSAYNKHRDKPIREQAENIIHLFTLTNLGAPRAFKYFDTTIDRKVYRSTKEVLDATLIHQSITGLYETRIDLSQLGGD

SEQ ID NO: 8682 - protein, 1107 aa, synthetic construct
ATRSFILKIEPNEEVKKGLWKTHEVLNHGIAYYMNILKLIRQEAIYEHHEQDPKNPKKVSKAEIQAELWDFVLKMQKCNSFTHEVDKDEVFNILRELYEELVPSSVEKKGEANQLSNKFLYPLVDPNSQSGKGTASSGRKPRWYNLKIAGDPSWEEEKKKWEEDKKKDPLAKILGKLAEYGLIPLFIPYTDSNEPIVKEIKWMEKSRNQSVRRLDKDMFIQALERFLSWESWNLKVKEEYEKVEKEYKTLEERIKEDIQALKALEQYEKERQEQLLRDTLNTNEYRLSKRGLRGWREIIQKWLKMDENEPSEKYLEVFKDYQRKHPREAGDYSVYEFLSKKENHFIWRNHPEYPYLYATFCEIDKKKKDAKQQATFTLADPINHPLWVRFEERSGSNLNKYRILTEQLHTEKLKKKLTVQLDRLIYPTESGGWEEKGKVDIVLLPSRQFYNQIFLDIEEKGKHAFTYKDESIKFPLKGTLGGARVQFDRDHLRRYPHKVESGNVGRIYFNMTVNIEPTESPVSKSLKIHRDDFPKVVNFKPKELTEWIKDSKGKKLKSGIESLEIGLRVMSIDLGQRQAAAASIFEVVDQKPDIEGKLFFPIKGTELYAVHRASFNIKLPGETLVKSREVLRKAREDNLKLMNQKLNFLRNVLHFQQFEDITEREKRVTKWISRQENSDVPLVYQDELIQIRELMYKPYKDWVAFLKQLHKRLEVEIGKEVKHWRKSLSDGRKGLYGISLKNIDEIDRTRKFLLRWSLRPTEPGEVRRLEPGQRFAIDQLNHLNALKEDRLKKMANTIIMHALGYCYDVRKKKWQAKNPACQIILFEDLSNYNPYEERSRFENSKLMKWSRREIPRQVALQGEIYGLQVGEVGAQFSSRFHAKTGSPGIRCSVVTKEKLQDNRFFKNLQREGRLTLDKIAVLKEGDLYPDKGGEKFISLSKDRKCVTTHADINAAQNLQKRFWTRTHGFYKVYCKAYQVDGQTVYIPESKDQKQKIIEEFGEGYFILKDGVYEWVNAGKLKIKKGSSKQSSSELVDSDILKDSFDLASELKGEKLMLYRDPSGNVFPSDKWMAAGVFFGKLERILISKLTNQYSISTIEDDSSKQSM

SEQ ID NO: 8683 - protein, 1367 aa, synthetic construct
DKKYSIGLDIGTNSVGWAVITDEYKVPSKKFKVLGNTDRHSIKKNLIGALLFDSGETAEATRLKRTARRRYTRRKNRICYLQEIFSNEMAKVDDSFFHRLEESFLVEEDKKHERHPIFGNIVDEVAYHEKYPTIYHLRKKLVDSTDKADLRLIYLALAHMIKFRGHFLIEGDLNPDNSDVDKLFIQLVQTYNQLFEENPINASGVDAKAILSARLSKSRRLENLIAQLPGEKKNGLFGNLIALSLGLTPNFKSNFDLAEDAKLQLSKDTYDDDLDNLLAQIGDQYADLFLAAKNLSDAILLSDILRVNTEITKAPLSASMIKRYDEHHQDLTLLKALVRQQLPEKYKEIFFDQSKNGYAGYIDGGASQEEFYKFIKPILEKMDGTEELLVKLNREDLLRKQRTFDNGSIPHQIHLGELHAILRRQEDFYPFLKDNREKIEKILTFRIPYYVGPLARGNSRFAWMTRKSEETITPWNFEEVVDKGASAQSFIERMTNFDKNLPNEKVLPKHSLLYEYFTVYNELTKVKYVTEGMRKPAFLSGEQKKAIVDLLFKTNRKVTVKQLKEDYFKKIECFDSVEISGVEDRFNASLGTYHDLLKIIKDKDFLDNEENEDILEDIVLTLTLFEDREMIEERLKTYAHLFDDKVMKQLKRRRYTGWGRLSRKLINGIRDKQSGKTILDFLKSDGFANRNFMQLIHDDSLTFKEDIQKAQVSGQGDSLHEHIANLAGSPAIKKGILQTVKVVDELVKVMGRHKPENIVIEMARENQTTQKGQKNSRERMKRIEEGIKELGSQILKEHPVENTQLQNEKLYLYYLQNGRDMYVDQELDINRLSDYDVDHIVPQSFLKDDSIDNKVLTRSDKNRGKSDNVPSEEVVKKMKNYWRQLLNAKLITQRKFDNLTKAERGGLSELDKAGFIKRQLVETRQITKHVAQILDSRMNTKYDENDKLIREVKVITLKSKLVSDFRKDFQFYKVREINNYHHAHDAYLNAVVGTALIKKYPKLESEFVYGDYKVYDVRKMIAKSEQEIGKATAKYFFYSNIMNFFKTEITLANGEIRKRPLIETNGETGEIVWDKGRDFATVRKVLSMPQVNIVKKTEVQTGGFSKESILPKRNSDKLIARKKDWDPKKYGGFVSPTVAYSVLVVAKVEKGKSKKLKSVKELLGITIMERSSFEKNPIDFLEAKGYKEVKKDLIIKLPKYSLFELENGRKRMLASARELQKGNELALPSKYVNFLYLASHYEKLKGSPEDNEQKQLFVEQHKHYLDEIIEQISEFSKRVILADANLDKVLSAYNKHRDKPIREQAENIIHLFTLTNLGAPAAFKYFDTTIDRKQYRSTKEVLDATLIHQSITGLYETRIDLSQLGGD

SEQ ID NO: 8684 - protein, 1367 aa, synthetic construct
DKKYSIGLDIGTNSVGWAVITDEYKVPSKKFKVLGNTDRHSIKKNLIGALLFDSGETAERTRLKRTARRRYTRRKNRICYLQEIFSNEMAKVDDSFFHRLEESFLVEEDKKHERHPIFGNIVDEVAYHEKYPTIYHLRKKLVDSTDKADLRLIYLALAHMIKFRGHFLIEGDLNPDNSDVDKLFIQLVQTYNQLFEENPINASGVDAKAILSARLSKSRRLENLIAQLPGEKKNGLFGNLIALSLGLTPNFKSNFDLAEDAKLQLSKDTYDDDLDNLLAQIGDQYADLFLAAKNLSDAILLSDILRVNTEITKAPLSASMIKRYDEHHQDLTLLKALVRQQLPEKYKEIFFDQSKNGYAGYIDGGASQEEFYKFIKPILEKMDGTEELLVKLNREDLLRKQRTFDNGSIPHQIHLGELHAILRRQEDFYPFLKDNREKIEKILTFRIPYYVGPLARGNSRFAWMTRKSEETITPWNFEEVVDKGASAQSFIERMTNFDKNLPNEKVLPKHSLLYEYFTVYNELTKVKYVTEGMRKPAFLSGEQKKAIVDLLFKTNRKVTVKQLKEDYFKKIECFDSVEISGVEDRFNASLGTYHDLLKIIKDKDFLDNEENEDILEDIVLTLTLFEDREMIEERLKTYAHLFDDKVMKQLKRRRYTGWGRLSRKLINGIRDKQSGKTILDFLKSDGFANRNFMQLIHDDSLTFKEDIQKAQVSGQGDSLHEHIANLAGSPAIKKGILQTVKVVDELVKVMGRHKPENIVIEMARENQTTQKGQKNSRERMKRIEEGIKELGSQILKEHPVENTQLQNEKLYLYYLQNGRDMYVDQELDINRLSDYDVDHIVPQSFLKDDSIDNKVLTRSDKNRGKSDNVPSEEVVKKMKNYWRQLLNAKLITQRKFDNLTKAERGGLSELDKAGFIKRQLVETRQITKHVAQILDSRMNTKYDENDKLIREVKVITLKSKLVSDFRKDFQFYKVREINNYHHAHDAYLNAVVGTALIKKYPKLESEFVYGDYKVYDVRKMIAKSEQEIGKATAKYFFYSNIMNFFKTEITLANGEIRKRPLIETNGETGEIVWDKGRDFATVRKVLSMPQVNIVKKTEVQTGGFSKESIRPKRNSDKLIARKKDWDPKKYGGFLWPTVAYSVLVVAKVEKGKSKKLKSVKELLGITIMERSSFEKNPIDFLEAKGYKEVKKDLIIKLPKYSLFELENGRKRMLASAKQLQKGNELALPSKYVNFLYLASHYEKLKGSPEDNEQKQLFVEQHKHYLDEIIEQISEFSKRVILADANLDKVLSAYNKHRDKPIREQAENIIHLFTLTRLGAPRAFKYFDTTIDPKQYRSTKEVLDATLIHQSITGLYETRIDLSQLGGD

SEQ ID NO: 8685 - protein, 1056 aa, synthetic construct
NQKFILGLDIGITSVGYGLIDYETKNIIDAGVRLFPEANVENNEGRRSKRGSRRLKRRRIHRLERVKLLLTEYDLINKEQIPTSNNPYQIRVKGLSEILSKDELAIALLHLAKRRGIHNVDVAADKEETASDSLSTKDQINKNAKFLESRYVCELQKERLENEGHVRGVENRFLTKDIVREAKKIIDTQMQYYPEIDETFKEKYISLVETRREYFEGPGQGSPFGWNGDLKKWYEMLMGHCTYFPQELRSVKYAYSADLFNALNDLNNLIIQRDNSEKLEYHEKYHIIENVFKQKKKPTLKQIAKEIGVNPEDIKGYRITKSGTPEFTSFKLFHDLKKVVKDHAILDDIDLLNQIAEILTIYQDKDSIVAELGQLEYLMSEADKQSISELTGYTGTHSLSLKCMNMIIDELWHSSMNQMEVFTYLNMRPKKYELKGYQRIPTDMIDDAILSPVVKRTFIQSINVINKVIEKYGIPEDIIIELARENNSDDRKKFINNLQKKNEATRKRINEIIGQTGNQNAKRIVEKIRLHDQQEGKCLYSLESIPLEDLLNNPNHYEVDHIIPRSVSFDNSYHNKVLVKQSENSKKSNLTPYQYFNSGKSKLSYNQFKQHILNLSKSQDRISKKKKEYLLEERDINKFEVQKEFINRNLVDTRYATRELTNYLKAYFSANNMNVKVKTINGSFTDYLRKVWKFKKERNHGYKHHAEDALIIANADFLFKENKKLKAVNSVLEKPEIETKQLDIQVDSEDNYSEMFIIPKQVQDIKDFRNFKYSHRVDKKPNRQLINDTLYSTRKKDNSTYIVQTIKDIYAKDNTTLKKQFDKSPEKFLMYQHDPRTFEKLEVIMKQYANEKNPLAKYHEETGEYLTKYSKKNNGPIVKSLKYIGNKLGSHLDVTHQFKSSTKKLVKLSIKNYRFDVYLTEKGYKFVTIAYLNVFKKDNYYYIPKDKYQELKEKKKIKDTDQFIASFYKNDLIKLNGDLYKIIGVNSDDRNIIELDYYDIKYKDYCEINNIKGEPRIKKTIGKKTESIEKFTTDVLGNLYLHSTEKAPQLIFKRGL

SEQ ID NO: 8686 - protein, 1056 aa, synthetic construct
NQKFILGLDIGITSVGYGLIDYETKNIIDAGVRLFPEANVENNEGRRSKRGSRRLKRRRIHRLERVKLLLTEYDLINKEQIPTSNNPYQIRVKGLSEILSKDELAIALLHLAKRRGIHNVDVAADKEETASDSLSTKDQINKNAKFLESRYVCELQKERLENEGHVRGVENRFLTKDIVREAKKIIDTQMQYYPEIDETFKEKYISLVETRREYFEGPGQGSPFGWNGDLKKWYEMLMGHCTYFPQELRSVKYAYSADLFNALNDLNNLIIQRDNSEKLEYHEKYHIIENVFKQKKKPTLKQIAKEIGVNPEDIKGYRITKSGTPEFTSFKLFHDLKKVVKDHAILDDIDLLNQIAEILTIYQDKDSIVAELGQLEYLMSEADKQSISELTGYTGTHSLSLKCMNMIIDELWHSSMNQMEVFTYLNMRPKKYELKGYQRIPTDMIDDAILSPVVKRTFIQSINVINKVIEKYGIPEDIIIELARENNSDDRKKFINNLQKKNEATRKRINEIIGQTGNQNAKRIVEKIRLHDQQEGKCLYSLESIPLEDLLNNPNHYEVDHIIPRSVSFDNSYHNKVLVKQSENSKKSNLTPYQYFNSGKSKLSYNQFKQHILNLSKSQDRISKKKKEYLLEERDINKFEVQKEFINRNLVDTRYATRELTSYLKAYFSANNMDVKVKTINGSFTNHLRKVWRFDKYRNHGYKHHAEDALIIANADFLFKENKKLQNTNKILEKPTIENNTKKVTVEKEEDYNNVFETPKLVEDIKQYRDYKFSHRVDKKPNRQLINDTLYSTRMKDEHDYIVQTITDIYGKDNTNLKKQFNKNPEKFLMYQNDPKTFEKLSIIMKQYSDEKNPLAKYYEETGEYLTKYSKKNNGPIVKKIKLLGNKVGNHLDVTNKYENSTKKLVKLSIKNYRFDVYLTEKGYKFVTIAYLNVFKKDNYYYIPKDKYQELKEKKKIKDTDQFIASFYKNDLIKLNGDLYKIIGVNSDDRNIIELDYYDIKYKDYCEINNIKGEPRIKKTIGKKTESIEKFTTDVLGNLYLHSTEKAPQLIFKRGL

SEQ ID NO: 8687 - protein, 1367 aa, synthetic construct
DKKYSIGLDIGTNSVGWAVITDEYKVPSKKFKVLGNTDRHSIKKNLIGALLFDSGETAEATRLKRTARRRYTRRKNRICYLQEIFSNEMAKVDDSFFHRLEESFLVEEDKKHERHPIFGNIVDEVAYHEKYPTIYHLRKKLVDSTDKADLRLIYLALAHMIKFRGHFLIEGDLNPDNSDVDKLFIQLVQTYNQLFEENPINASGVDAKAILSARLSKSRRLENLIAQLPGEKKNGLFGNLIALSLGLTPNFKSNFDLAEDAKLQLSKDTYDDDLDNLLAQIGDQYADLFLAAKNLSDAILLSDILRVNTEITKAPLSASMIKRYDEHHQDLTLLKALVRQQLPEKYKEIFFDQSKNGYAGYIDGGASQEEFYKFIKPILEKMDGTEELLVKLNREDLLRKQRTFDNGSIPHQIHLGELHAILRRQEDFYPFLKDNREKIEKILTFRIPYYVGPLARGNSRFAWMTRKSEETITPWNFEEVVDKGASAQSFIERMTNFDKNLPNEKVLPKHSLLYEYFTVYNELTKVKYVTEGMRKPAFLSGEQKKAIVDLLFKTNRKVTVKQLKEDYFKKIECFDSVEISGVEDRFNASLGTYHDLLKIIKDKDFLDNEENEDILEDIVLTLTLFEDREMIEERLKTYAHLFDDKVMKQLKRRRYTGWGRLSRKLINGIRDKQSGKTILDFLKSDGFANRNFMQLIHDDSLTFKEDIQKAQVSGQGDSLHEHIANLAGSPAIKKGILQTVKVVDELVKVMGRHKPENIVIEMARENQTTQKGQKNSRERMKRIEEGIKELGSQILKEHPVENTQLQNEKLYLYYLQNGRDMYVDQELDINRLSDYDVDHIVPQSFLKDDSIDNKVLTRSDKNRGKSDNVPSEEVVKKMKNYWRQLLNAKLITQRKFDNLTKAERGGLSELDKAGFIKRQLVETRQITKHVAQILDSRMNTKYDENDKLIREVKVITLKSKLVSDFRKDFQFYKVREINNYHHAHDAYLNAVVGTALIKKYPKLESEFVYGDYKVYDVRKMIAKSEQEIGKATAKYFFYSNIMNFFKTEITLANGEIRKRPLIETNGETGEIVWDKGRDFATVRKVLSMPQVNIVKKTEVQTGGFSKESILPKRNSDKLIARKKDWDPKKYGGFLWPTVAYSVLVVAKVEKGKSKKLKSVKELLGITIMERSSFEKNPIDFLEAKGYKEVKKDLIIKLPKYSLFELENGRKRMLASAKQLQKGNELALPSKYVNFLYLASHYEKLKGSPEDNEQKQLFVEQHKHYLDEIIEQISEFSKRVILADANLDKVLSAYNKHRDKPIREQAENIIHLFTLTNLGAPAAFKYFDTTIDRKQYRSTKEVLDATLIHQSITGLYETRIDLSQLGGD

SEQ ID NO: 8688 - protein, 1053 aa, synthetic construct
NQKFILGLDIGITSVGYGLIDYETKNIIDAGVRLFPEANVENNEGRRSKRGSRRLKRRRIHRLERVKKLLEDYNLLDQSQIPQSTNPYAIRVKGLSEALSKDELVIALLHIAKRRGIHKIDVIDSNDDVGNELSTKEQLNKNSKLLKDKFVCQIQLERMNEGQVRGEKNRFKTADIIKEIIQLLNVQKNFHQLDENFINKYIELVEMRREYFEGPGKGSPYGWEGDPKAWYETLMGHCTYFPDELRSVKYAYSADLFNALNDLNNLVIQRDGLSKLEYHEKYHIIENVFKQKKKPTLKQIANEINVNPEDIKGYRITKSGKPQFTEFKLYHDLKSVLFDQSILENEDVLDQIAEILTIYQDKDSIKSKLTELDILLNEEDKENIAQLTGYTGTHRLSLKCIRLVLEEQWYSSRNQMEIFTHLNIKPKKINLTAANKIPKAMIDEFILSPVVKRTFGQAINLINKIIEKYGVPEDIIIELARENNSKDKQKFINEMQKKNENTRKRINEIIGKYGNQNAKRLVEKIRLHDEQEGKCLYSLESIPLEDLLNNPNHYEVDHIIPRSVSFDNSYHNKVLVKQSEASKKSNLTPYQYFNSGKSKLSYNQFKQHILNLSKSQDRISKKKKEYLLEERDINKFEVQKEFINRNLVDTRYATRELTNYLKAYFSANNMNVKVKTINGSFTDYLRKVWKFKKERNHGYKHHAEDALIIANADFLFKENKKLKAVNSVLEKPEIESKQLDIQVDSEDNYSEMFIIPKQVQDIKDFRNFKYSHRVDKKPNRQLINDTLYSTRKKDNSTYIVQTIKDIYAKDNTTLKKQFDKSPEKFLMYQHDPRTFEKLEVIMKQYANEKNPLAKYHEETGEYLTKYSKKNNGPIVKSLKYIGNKLGSHLDVTHQFKSSTKKLVKLSIKPYRFDVYLTDKGYKFITISYLDVLKKDNYYYIPEQKYDKLKLGKAIDKNAKFIASFYKNDLIKLDGEIYKIIGVNSDTRNMIELDLPDIRYKEYCELNNIKGEPRIKKTIGKKVNSIEKLTTDVLGNVFTNTQYTKPQLLFKRGN

SEQ ID NO: 8689 - protein, 1052 aa, synthetic construct
KRNYILGLDIGITSVGYGIIDYETRDVIDAGVRLFKEANVENNEGRRSKRGARRLKRRRRHRIQRVKKLLFDYNLLTDHSELSGINPYEARVKGLSQKLSEEEFSAALLHLAKRRGVHNVNEVEEDTGNELSTKEQISRNSKALEEKYVAELQLERLKKDGEVRGSINRFKTSDYVKEAKQLLKVQKAYHQLDQSFIDTYIDLLETRRTYYEGPGEGSPFGWKDIKEWYEMLMGHCTYFPEELRSVKYAYNADLYNALNDLNNLVITRDENEKLEYYEKFQIIENVFKQKKKPTLKQIAKEILVNEEDIKGYRVTSTGKPEFTNLKVYHDIKDITARKEIIENAELLDQIAKILTIYQSSEDIQEELTNLNSELTQEEIEQISNLKGYTGTHNLSLKAINLILDELWHTNDNQIAIFNRLKLVPKKVDLSQQKEIPTTLVDDFILSPVVKRSFIQSIKVINAIIKKYGLPNDIIIELAREKNSKDAQKMINEMQKRNRQTNERIEEIIRTTGKENAKYLIEKIKLHDMQEGKCLYSLEAIPLEDLLNNPFNYEVDHIIPRSVSFDNSFNNKVLVKQEEASKKGNRTPFQYLSSSDSKISYETFKKHILNLAKGKGRISKTKKEYLLEERDINRFSVQKDFINRNLVDTRYATRGLMNLLRSYFRVNNLDVKVKSINGGFTSFLRRKWKFKKERNKGYKHHAEDALIIANADFIFKEWKKLDKAKKVMENQMFEEKQAESMPEIETEQEYKEIFITPHQIKHIKDFKDYKYSHRVDKKPNRELINDTLYSTRKDDKGNTLIVNNLNGLYDKDNDKLKKLINKSPEKLLMYHHDPQTYQKLKLIMEQYGDEKNPLYKYYEETGNYLTKYSKKDNGPVIKKIKYYGNKLNAHLDITDDYPNSRNKVVKLSLKPYRFDVYLDNGVYKFVTVKNLDVIKKENYYEVNSKCYEEAKKLKKISNQAEFIASFYNNDLIKINGELYRVIGVNNDLLNRIEVNMIDITYREYLENMNDKRPPRIIKTIASKTQSIKKYSTDILGNLYEVKSKKHPQIIKKG

SEQ ID NO: 8690 - protein, 1367 aa, synthetic construct
DKKYSIGLDIGTNSVGWAVITDEYKVPSKKFKVLGNTDRHSIKKNLIGALLFDSGETAEATRLKRTARRRYTRRKNRICYLQEIFSNEMAKVDDSFFHRLEESFLVEEDKKHERHPIFGNIVDEVAYHEKYPTIYHLRKKLVDSTDKADLRLIYLALAHMIKFRGHFLIEGDLNPDNSDVDKLFIQLVQTYNQLFEENPINASGVDAKAILSARLSKSRRLENLIAQLPGEKKNGLFGNLIALSLGLTPNFKSNFDLAEDAKLQLSKDTYDDDLDNLLAQIGDQYADLFLAAKNLSDAILLSDILRVNTEITKAPLSASMIKRYDEHHQDLTLLKALVRQQLPEKYKEIFFDQSKNGYAGYIDGGASQEEFYKFIKPILEKMDGTEELLVKLNREDLLRKQRTFDNGSIPHQIHLGELHAILRRQEDFYPFLKDNREKIEKILTFRIPYYVGPLARGNSRFAWMTRKSEETITPWNFEEVVDKGASAQSFIERMTNFDKNLPNEKVLPKHSLLYEYFTVYNELTKVKYVTEGMRKPAFLSGEQKKAIVDLLFKTNRKVTVKQLKEDYFKKIECFDSVEISGVEDRFNASLGTYHDLLKIIKDKDFLDNEENEDILEDIVLTLTLFEDREMIEERLKTYAHLFDDKVMKQLKRRRYTGWGRLSRKLINGIRDKQSGKTILDFLKSDGFANRNFMQLIHDDSLTFKEDIQKAQVSGQGDSLHEHIANLAGSPAIKKGILQTVKVVDELVKVMGRHKPENIVIEMARENQTTQKGQKNSRERMKRIEEGIKELGSQILKEHPVENTQLQNEKLYLYYLQNGRDMYVDQELDINRLSDYDVDAIVPQSFLKDDSIDNKVLTRSDKNRGKSDNVPSEEVVKKMKNYWRQLLNAKLITQRKFDNLTKAERGGLSELDKAGFIKRQLVETRQITKHVAQILDSRMNTKYDENDKLIREVKVITLKSKLVSDFRKDFQFYKVREINNYHHAHDAYLNAVVGTALIKKYPKLESEFVYGDYKVYDVRKMIAKSEQEIGKATAKYFFYSNIMNFFKTEITLANGEIRKRPLIETNGETGEIVWDKGRDFATVRKVLSMPQVNIVKKTEVQTGGFSKESIRPKRNSDKLIARKKDWDPKKYGGFVSPTVAYSVLVVAKVEKGKSKKLKSVKELLGITIMERSSFEKNPIDFLEAKGYKEVKKDLIIKLPKYSLFELENGRKRMLASARFLQKGNELALPSKYVNFLYLASHYEKLKGSPEDNEQKQLFVEQHKHYLDEIIEQISEFSKRVILADANLDKVLSAYNKHRDKPIREQAENIIHLFTLTNLGAPRAFKYFDTTIDRKVYRSTKEVLDATLIHQSITGLYETRIDLSQLGGD

SEQ ID NO: 8691 - protein, 1367 aa, synthetic construct
DKKYSIGLDIGTNSVGWAVITDEYKVPSKKFKVLGNTDRHSIKKNLIGALLFDSGETAEATRLKRTARRRYTRRKNRICYLQEIFSNEMAKVDDSFFHRLEESFLVEEDKKHERHPIFGNIVDEVAYHEKYPTIYHLRKKLVDSTDKADLRLIYLALAHMIKFRGHFLIEGDLNPDNSDVDKLFIQLVQTYNQLFEENPINASGVDAKAILSARLSKSRRLENLIAQLPGEKKNGLFGNLIALSLGLTPNFKSNFDLAEDAKLQLSKDTYDDDLDNLLAQIGDQYADLFLAAKNLSDAILLSDILRVNTEITKAPLSASMIKRYDEHHQDLTLLKALVRQQLPEKYKEIFFDQSKNGYAGYIDGGASQEEFYKFIKPILEKMDGTEELLVKLNREDLLRKQRTFDNGSIPHQIHLGELHAILRRQEDFYPFLKDNREKIEKILTFRIPYYVGPLARGNSRFAWMTRKSEETITPWNFEEVVDKGASAQSFIERMTNFDKNLPNEKVLPKHSLLYEYFTVYNELTKVKYVTEGMRKPAFLSGEQKKAIVDLLFKTNRKVTVKQLKEDYFKKIECFDSVEISGVEDRFNASLGTYHDLLKIIKDKDFLDNEENEDILEDIVLTLTLFEDREMIEERLKTYAHLFDDKVMKQLKRRRYTGWGRLSRKLINGIRDKQSGKTILDFLKSDGFANRNFMQLIHDDSLTFKEDIQKAQVSGQGDSLHEHIANLAGSPAIKKGILQTVKVVDELVKVMGRHKPENIVIEMARENQTTQKGQKNSRERMKRIEEGIKELGSQILKEHPVENTQLQNEKLYLYYLQNGRDMYVDQELDINRLSDYDVDAIVPQSFLKDDSIDNKVLTRSDKNRGKSDNVPSEEVVKKMKNYWRQLLNAKLITQRKFDNLTKAERGGLSELDKAGFIKRQLVETRQITKHVAQILDSRMNTKYDENDKLIREVKVITLKSKLVSDFRKDFQFYKVREINNYHHAHDAYLNAVVGTALIKKYPKLESEFVYGDYKVYDVRKMIAKSEQEIGKATAKYFFYSNIMNFFKTEITLANGEIRKRPLIETNGETGEIVWDKGRDFATVRKVLSMPQVNIVKKTEVQTGGFSKESILPKRNSDKLIARKKDWDPKKYGGFVSPTVAYSVLVVAKVEKGKSKKLKSVKELLGITIMERSSFEKNPIDFLEAKGYKEVKKDLIIKLPKYSLFELENGRKRMLASARELQKGNELALPSKYVNFLYLASHYEKLKGSPEDNEQKQLFVEQHKHYLDEIIEQISEFSKRVILADANLDKVLSAYNKHRDKPIREQAENIIHLFTLTNLGAPAAFKYFDTTIDRKQYRSTKEVLDATLIHQSITGLYETRIDLSQLGGD

SEQ ID NO: 8692 - protein, 1367 aa, synthetic construct
DKKYSIGLDIGTNSVGWAVITDEYKVPSKKFKVLGNTDRHSIKKNLIGALLFDSGETAERTRLKRTARRRYTRRKNRICYLQEIFSNEMAKVDDSFFHRLEESFLVEEDKKHERHPIFGNIVDEVAYHEKYPTIYHLRKKLVDSTDKADLRLIYLALAHMIKFRGHFLIEGDLNPDNSDVDKLFIQLVQTYNQLFEENPINASGVDAKAILSARLSKSRRLENLIAQLPGEKKNGLFGNLIALSLGLTPNFKSNFDLAEDAKLQLSKDTYDDDLDNLLAQIGDQYADLFLAAKNLSDAILLSDILRVNTEITKAPLSASMIKRYDEHHQDLTLLKALVRQQLPEKYKEIFFDQSKNGYAGYIDGGASQEEFYKFIKPILEKMDGTEELLVKLNREDLLRKQRTFDNGSIPHQIHLGELHAILRRQEDFYPFLKDNREKIEKILTFRIPYYVGPLARGNSRFAWMTRKSEETITPWNFEEVVDKGASAQSFIERMTNFDKNLPNEKVLPKHSLLYEYFTVYNELTKVKYVTEGMRKPAFLSGEQKKAIVDLLFKTNRKVTVKQLKEDYFKKIECFDSVEISGVEDRFNASLGTYHDLLKIIKDKDFLDNEENEDILEDIVLTLTLFEDREMIEERLKTYAHLFDDKVMKQLKRRRYTGWGRLSRKLINGIRDKQSGKTILDFLKSDGFANRNFMQLIHDDSLTFKEDIQKAQVSGQGDSLHEHIANLAGSPAIKKGILQTVKVVDELVKVMGRHKPENIVIEMARENQTTQKGQKNSRERMKRIEEGIKELGSQILKEHPVENTQLQNEKLYLYYLQNGRDMYVDQELDINRLSDYDVDAIVPQSFLKDDSIDNKVLTRSDKNRGKSDNVPSEEVVKKMKNYWRQLLNAKLITQRKFDNLTKAERGGLSELDKAGFIKRQLVETRQITKHVAQILDSRMNTKYDENDKLIREVKVITLKSKLVSDFRKDFQFYKVREINNYHHAHDAYLNAVVGTALIKKYPKLESEFVYGDYKVYDVRKMIAKSEQEIGKATAKYFFYSNIMNFFKTEITLANGEIRKRPLIETNGETGEIVWDKGRDFATVRKVLSMPQVNIVKKTEVQTGGFSKESIRPKRNSDKLIARKKDWDPKKYGGFLWPTVAYSVLVVAKVEKGKSKKLKSVKELLGITIMERSSFEKNPIDFLEAKGYKEVKKDLIIKLPKYSLFELENGRKRMLASAKQLQKGNELALPSKYVNFLYLASHYEKLKGSPEDNEQKQLFVEQHKHYLDEIIEQISEFSKRVILADANLDKVLSAYNKHRDKPIREQAENIIHLFTLTRLGAPRAFKYFDTTIDPKQYRSTKEVLDATLIHQSITGLYETRIDLSQLGGD

SEQ ID NO: 8693 - protein, 1056 aa, synthetic construct
NQKFILGLDIGITSVGYGLIDYETKNIIDAGVRLFPEANVENNEGRRSKRGSRRLKRRRIHRLERVKLLLTEYDLINKEQIPTSNNPYQIRVKGLSEILSKDELAIALLHLAKRRGIHNVDVAADKEETASDSLSTKDQINKNAKFLESRYVCELQKERLENEGHVRGVENRFLTKDIVREAKKIIDTQMQYYPEIDETFKEKYISLVETRREYFEGPGQGSPFGWNGDLKKWYEMLMGHCTYFPQELRSVKYAYSADLFNALNDLNNLIIQRDNSEKLEYHEKYHIIENVFKQKKKPTLKQIAKEIGVNPEDIKGYRITKSGTPEFTSFKLFHDLKKVVKDHAILDDIDLLNQIAEILTIYQDKDSIVAELGQLEYLMSEADKQSISELTGYTGTHSLSLKCMNMIIDELWHSSMNQMEVFTYLNMRPKKYELKGYQRIPTDMIDDAILSPVVKRTFIQSINVINKVIEKYGIPEDIIIELARENNSDDRKKFINNLQKKNEATRKRINEIIGQTGNQNAKRIVEKIRLHDQQEGKCLYSLESIPLEDLLNNPNHYEVDHIIPRSVSFDNSYHNKVLVKQSEASKKSNLTPYQYFNSGKSKLSYNQFKQHILNLSKSQDRISKKKKEYLLEERDINKFEVQKEFINRNLVDTRYATRELTNYLKAYFSANNMNVKVKTINGSFTDYLRKVWKFKKERNHGYKHHAEDALIIANADFLFKENKKLKAVNSVLEKPEIETKQLDIQVDSEDNYSEMFIIPKQVQDIKDFRNFKYSHRVDKKPNRQLINDTLYSTRKKDNSTYIVQTIKDIYAKDNTTLKKQFDKSPEKFLMYQHDPRTFEKLEVIMKQYANEKNPLAKYHEETGEYLTKYSKKNNGPIVKSLKYIGNKLGSHLDVTHQFKSSTKKLVKLSIKNYRFDVYLTEKGYKFVTIAYLNVFKKDNYYYIPKDKYQELKEKKKIKDTDQFIASFYKNDLIKLNGDLYKIIGVNSDDRNIIELDYYDIKYKDYCEINNIKGEPRIKKTIGKKTESIEKFTTDVLGNLYLHSTEKAPQLIFKRGL

SEQ ID NO: 8694 - protein, 1056 aa, synthetic construct
NQKFILGLDIGITSVGYGLIDYETKNIIDAGVRLFPEANVENNEGRRSKRGSRRLKRRRIHRLERVKLLLTEYDLINKEQIPTSNNPYQIRVKGLSEILSKDELAIALLHLAKRRGIHNVDVAADKEETASDSLSTKDQINKNAKFLESRYVCELQKERLENEGHVRGVENRFLTKDIVREAKKIIDTQMQYYPEIDETFKEKYISLVETRREYFEGPGQGSPFGWNGDLKKWYEMLMGHCTYFPQELRSVKYAYSADLFNALNDLNNLIIQRDNSEKLEYHEKYHIIENVFKQKKKPTLKQIAKEIGVNPEDIKGYRITKSGTPEFTSFKLFHDLKKVVKDHAILDDIDLLNQIAEILTIYQDKDSIVAELGQLEYLMSEADKQSISELTGYTGTHSLSLKCMNMIIDELWHSSMNQMEVFTYLNMRPKKYELKGYQRIPTDMIDDAILSPVVKRTFIQSINVINKVIEKYGIPEDIIIELARENNSDDRKKFINNLQKKNEATRKRINEIIGQTGNQNAKRIVEKIRLHDQQEGKCLYSLESIPLEDLLNNPNHYEVDHIIPRSVSFDNSYHNKVLVKQSEASKKSNLTPYQYFNSGKSKLSYNQFKQHILNLSKSQDRISKKKKEYLLEERDINKFEVQKEFINRNLVDTRYATRELTSYLKAYFSANNMDVKVKTINGSFTNHLRKVWRFDKYRNHGYKHHAEDALIIANADFLFKENKKLQNTNKILEKPTIENNTKKVTVEKEEDYNNVFETPKLVEDIKQYRDYKFSHRVDKKPNRQLINDTLYSTRMKDEHDYIVQTITDIYGKDNTNLKKQFNKNPEKFLMYQNDPKTFEKLSIIMKQYSDEKNPLAKYYEETGEYLTKYSKKNNGPIVKKIKLLGNKVGNHLDVTNKYENSTKKLVKLSIKNYRFDVYLTEKGYKFVTIAYLNVFKKDNYYYIPKDKYQELKEKKKIKDTDQFIASFYKNDLIKLNGDLYKIIGVNSDDRNIIELDYYDIKYKDYCEINNIKGEPRIKKTIGKKTESIEKFTTDVLGNLYLHSTEKAPQLIFKRGL

SEQ ID NO: 8695 - protein, 1367 aa, synthetic construct
DKKYSIGLDIGTNSVGWAVITDEYKVPSKKFKVLGNTDRHSIKKNLIGALLFDSGETAEATRLKRTARRRYTRRKNRICYLQEIFSNEMAKVDDSFFHRLEESFLVEEDKKHERHPIFGNIVDEVAYHEKYPTIYHLRKKLVDSTDKADLRLIYLALAHMIKFRGHFLIEGDLNPDNSDVDKLFIQLVQTYNQLFEENPINASGVDAKAILSARLSKSRRLENLIAQLPGEKKNGLFGNLIALSLGLTPNFKSNFDLAEDAKLQLSKDTYDDDLDNLLAQIGDQYADLFLAAKNLSDAILLSDILRVNTEITKAPLSASMIKRYDEHHQDLTLLKALVRQQLPEKYKEIFFDQSKNGYAGYIDGGASQEEFYKFIKPILEKMDGTEELLVKLNREDLLRKQRTFDNGSIPHQIHLGELHAILRRQEDFYPFLKDNREKIEKILTFRIPYYVGPLARGNSRFAWMTRKSEETITPWNFEEVVDKGASAQSFIERMTNFDKNLPNEKVLPKHSLLYEYFTVYNELTKVKYVTEGMRKPAFLSGEQKKAIVDLLFKTNRKVTVKQLKEDYFKKIECFDSVEISGVEDRFNASLGTYHDLLKIIKDKDFLDNEENEDILEDIVLTLTLFEDREMIEERLKTYAHLFDDKVMKQLKRRRYTGWGRLSRKLINGIRDKQSGKTILDFLKSDGFANRNFMQLIHDDSLTFKEDIQKAQVSGQGDSLHEHIANLAGSPAIKKGILQTVKVVDELVKVMGRHKPENIVIEMARENQTTQKGQKNSRERMKRIEEGIKELGSQILKEHPVENTQLQNEKLYLYYLQNGRDMYVDQELDINRLSDYDVDAIVPQSFLKDDSIDNKVLTRSDKNRGKSDNVPSEEVVKKMKNYWRQLLNAKLITQRKFDNLTKAERGGLSELDKAGFIKRQLVETRQITKHVAQILDSRMNTKYDENDKLIREVKVITLKSKLVSDFRKDFQFYKVREINNYHHAHDAYLNAVVGTALIKKYPKLESEFVYGDYKVYDVRKMIAKSEQEIGKATAKYFFYSNIMNFFKTEITLANGEIRKRPLIETNGETGEIVWDKGRDFATVRKVLSMPQVNIVKKTEVQTGGFSKESILPKRNSDKLIARKKDWDPKKYGGFLWPTVAYSVLVVAKVEKGKSKKLKSVKELLGITIMERSSFEKNPIDFLEAKGYKEVKKDLIIKLPKYSLFELENGRKRMLASAKQLQKGNELALPSKYVNFLYLASHYEKLKGSPEDNEQKQLFVEQHKHYLDEIIEQISEFSKRVILADANLDKVLSAYNKHRDKPIREQAENIIHLFTLTNLGAPAAFKYFDTTIDRKQYRSTKEVLDATLIHQSITGLYETRIDLSQLGGD

SEQ ID NO: 8696 - protein, 30 aa, synthetic construct
MDSLLMNRRKFLYQFKNVRWAKGRRETYLC

SEQ ID NO: 8697 - protein, 18 aa, synthetic construct
KRTADGSEFESPKKKRKV

SEQ ID NO: 8698 - protein, 17 aa, synthetic construct
KRTADGSEFEPKKKRKV

SEQ ID NO: 8699 - protein, 19 aa, synthetic construct
NLSKRPAAIKKAGQAKKKK

SEQ ID NO: 8700 - protein, 11 aa, synthetic construct
RQRRNELKRSF

SEQ ID NO: 8701 - protein, 38 aa, synthetic construct
NQSSNFGPMKGGNFGGRSSGPYGGGGQYFAKPRNQGGY

SEQ ID NO: 8702 - protein, 7 aa, synthetic construct
PKKKRKV

SEQ ID NO: 8703 - protein, 19 aa, synthetic construct
MKRTADGSEFESPKKKRKV

SEQ ID NO: 8704 - protein, 20 aa, synthetic construct
AVKRPAATKKAGQAKKKKLD

SEQ ID NO: 8705 - protein, 25 aa, synthetic construct
MSRRRKANPTKLSENAKKLAKEVEN

SEQ ID NO: 8706 - protein, 9 aa, synthetic construct
PAAKRVKLD

SEQ ID NO: 8707 - protein, 9 aa, synthetic construct
KLKIKRPVK

SEQ ID NO: 8708 - protein, 8 aa, synthetic construct
VSRKRPRP

SEQ ID NO: 8709 - protein, 10 aa, synthetic construct
EGAPPAKRAR

SEQ ID NO: 8710 - protein, 12 aa, synthetic construct
PPQPKKKPLDGE

SEQ ID NO: 8711 - protein, 21 aa, synthetic construct
SGGSKRTADGSEFEPKKKRKV

SEQ ID NO: 8712 - protein, 150 aa, synthetic construct
  VARIANT 6..150: note = GGGGS repeats may be deleted
GGGGSGGGGSGGGGSGGGGSGGGGSGGGGSGGGGSGGGGSGGGGSGGGGSGGGGSGGGGSGGGGSGGGGSGGGGSGGGGSGGGGSGGGGSGGGGSGGGGSGGGGSGGGGSGGGGSGGGGSGGGGSGGGGSGGGGSGGGGSGGGGSGGGGS

SEQ ID NO: 8713 - protein, 30 aa, synthetic construct
  VARIANT 2..30: note = Residues may be deleted
GGGGGGGGGGGGGGGGGGGGGGGGGGGGGG

SEQ ID NO: 8714 - protein, 150 aa, synthetic construct
  VARIANT 6..150: note = EAAAK repeats may be deleted
EAAAKEAAAKEAAAKEAAAKEAAAKEAAAKEAAAKEAAAKEAAAKEAAAKEAAAKEAAAKEAAAKEAAAKEAAAKEAAAKEAAAKEAAAKEAAAKEAAAKEAAAKEAAAKEAAAKEAAAKEAAAKEAAAKEAAAKEAAAKEAAAKEAAAK

SEQ ID NO: 8715 - protein, 90 aa, synthetic construct
  VARIANT 4..90: note = GGS repeats may be deleted
GGSGGSGGSGGSGGSGGSGGSGGSGGSGGSGGSGGSGGSGGSGGSGGSGGSGGSGGSGGSGGSGGSGGSGGSGGSGGSGGSGGSGGSGGS

SEQ ID NO: 8716 - protein, 120 aa, synthetic construct
  VARIANT 5..120: note = SGGS repeats may be deleted
SGGSSGGSSGGSSGGSSGGSSGGSSGGSSGGSSGGSSGGSSGGSSGGSSGGSSGGSSGGSSGGSSGGSSGGSSGGSSGGSSGGSSGGSSGGSSGGSSGGSSGGSSGGSSGGSSGGSSGGS

SEQ ID NO: 8717 - protein, 60 aa, synthetic construct
  VARIANT 3..60: note = XP repeats may be deleted and wherein X can be any amino acid
  VARIANT 1: note = any amino acid
XPXPXPXPXPXPXPXPXPXPXPXPXPXPXPXPXPXPXPXPXPXPXPXPXPXPXPXPXPXP

SEQ ID NO: 8718 - protein, 21 aa, synthetic construct
  VARIANT 4..21: note = 6 or 4 GGS repeats may be deleted
GGSGGSGGSGGSGGSGGSGGS

SEQ ID NO: 8719 - protein, 16 aa, synthetic construct
SGSETPGTSESATPES

SEQ ID NO: 8720 - protein, 32 aa, synthetic construct
SGGSSGGSSGSETPGTSESATPESSGGSSGGS

SEQ ID NO: 8721 - protein, 10 aa, synthetic construct
SGGSGGSGGS

SEQ ID NO: 8722 - protein, 4 aa, synthetic construct
SGGS

SEQ ID NO: 8723 - protein, 60 aa, synthetic construct
SGGSSGGSSGSETPGTSESATPESAGSYPYDVPDYAGSAAPAAKKKKLDGSGSGGSSGGS

SEQ ID NO: 8724 - protein, 6 aa, synthetic construct
GGSGGS

SEQ ID NO: 8725 - protein, 9 aa, synthetic construct
GGSGGSGGS

SEQ ID NO: 8726 - protein, 33 aa, synthetic construct
SGGSSGGSSGSETPGTSESATPESSGGSSGGSS

SEQ ID NO: 8727 - protein, 38 aa, synthetic construct
AEAAKEAAKEAAKEAAKALEAEAAKEAAKEAAKEAAKA

SEQ ID NO: 8728 - protein, 76 aa, synthetic construct
AEAAKEAAKEAAKEAAKALEAEAAKEAAKEAAKEAAKAAEAAKEAAKEAAKEAAKALEAEAAKEAAKEAAKEAAKA

SEQ ID NO: 8729 - protein, 63 aa, synthetic construct
AGGSQYKLILNGKTLKGETTTEAVNAATAEKVFKQYANRNGVDGKWTYDDATKTFTVTEGGSA

SEQ ID NO: 8730 - protein, 141 aa, synthetic construct
KLSGGGGSGGGGSGGGGSAEAWYNLGNAYYKQGDYQKAIEYYQKALELDPNNAEAWYNLGNAYYKQGDYQKAIEYYQKALELDPNNAEAWYNLGNAYYKQGDYQKAIEDYQKALELDPNNLQRSAGGGGSGGGGSGGGGAS

SEQ ID NO: 8731 - protein, 63 aa, synthetic construct
AGGSQYKLILNGKTLKGETTTEAVDAATAEKVFKQYANDNGVDGEWTYDDATKTFTVTEGGSA

SEQ ID NO: 8732 - protein, 46 aa, synthetic construct
AGSGNSSGSGGSGGSGNSSGSGGSPVPSTPPTPSPSTPPTPSPSAS

SEQ ID NO: 8733 - protein, 47 aa, synthetic construct
AGGSSGGSSGGSSGGSSGGSSGGSSGGSSGGSSGGSSGGSSGGSSAS

SEQ ID NO: 8734 - protein, 39 aa, synthetic construct
AGGSSGGSSGGSSGGSSGGSSGGSSGGSSGGSSGGSSAS

SEQ ID NO: 8735 - protein, 144 aa, synthetic construct
AGSGGSGGSGGSPVPSTPPTPSPSTPPTPSPSIQRTPKIQVYSRHPAENGKSNFLNCYVSGFHPSDIEVDLLKNGERIEKVEHSDLSFSKDWSFYLLYYTEFTPTEKDEYACRVNHVTLSQPKIVKWDRDGGSGGSGGSGGSAS

SEQ ID NO: 8736 - protein, 152 aa, synthetic construct
AGSGGSGGSGGSPVPSTPPTPSPSTPPTPSPSIQRTPKIQVYSRHPAENGKSNFLNCYVSGFHPSDIEVDLLKNGERIEKVEHSDLSFSKDWSFYLLYYTEFTPTEKDEYACRVNHVTLSQPKIVKWDRDPVPSTPPTPSPSTPPTPSPSAS

SEQ ID NO: 8737 - protein, 74 aa, synthetic construct
AGSGGSGGSGGSPVPSTPPTNSSSTPPTPSPSPVPSTPPTNSSSTPPTPSPSPVPSTPPTNSSSTPPTPSPSAS

SEQ ID NO: 8738 - protein, 66 aa, synthetic construct
AGSGGSGGSGGSPVPSTPPTPSPSTPPTPSPSGGSGNSSGSGGSPVPSTPPTPSPSTPPTPSPSAS

SEQ ID NO: 8739 - protein, 74 aa, synthetic construct
AGSGGSGGSGGSPVPSTPPTPSPSTPPTPSPSPVPSTPPTNSSSTPPTPSPSPVPSTPPTPSPSTPPTPSPSAS

SEQ ID NO: 8740 - protein, 74 aa, synthetic construct
AGSGGSGGSGGSPVPSTPPTPSPSTPPTPSPSPVPSTPPTPSPSTPPTPSPSPVPSTPPTPSPSTPPTPSPSAS

SEQ ID NO: 8741 - protein, 121 aa, synthetic construct
AGSGGSGGSGGSPVPSTPPTPSPSTPPTPSPSQIFVKTLTGKTITLEVEPSDTIENVKAKIQDKEGIPPDQQRLIFAGKQLEDGRTLSDYNIQKESTLHLVLRLRGGGGSGGSGGSGGSAS

SEQ ID NO: 8742 - protein, 52 aa, synthetic construct
AGGGSGGGGSGGGGSGGGGSGGGGSGGGGSGGGGSGGGGSGGGGSGGGGSAS

SEQ ID NO: 8743 - protein, 33 aa, synthetic construct
AGGGGSGGGGSGGGGSGGGGSGGGGSGGGGSAS

SEQ ID NO: 8744 - protein, 37 aa, synthetic construct
AGGGSGGGGSGGGGSGGGGSGGGGSGGGGSGGGGSAS

SEQ ID NO: 8745 - protein, 42 aa, synthetic construct
AGGGSGGGGSGGGGSGGGGSGGGGSGGGGSGGGGSGGGGSAS

SEQ ID NO: 8746 - protein, 47 aa, synthetic construct
AGGGSGGGGSGGGGSGGGGSGGGGSGGGGSGGGGSGGGGSGGGGSAS

SEQ ID NO: 8747 - protein, 31 aa, synthetic construct
AGGSSGGSSGGSSGGSSGGSSGGSSGGSSAS

SEQ ID NO: 8748 - protein, 36 aa, synthetic construct
AGSQMALHANVTGAMNYTWATCTINTHAPRSMLGSA

SEQ ID NO: 8749 - protein, 43 aa, synthetic construct
GRMANFDGMDMSHKMALSSTNEIETNEGLAGTSLDVMDLSRVL

SEQ ID NO: 8750 - protein, 49 aa, synthetic construct
SAAAATPAVRTVPQYKYAAGVRNPQQHLNAQPQVTMQQPAVHVQGQEPL

SEQ ID NO: 8751 - protein, 50 aa, synthetic construct
VSGITGMVDPSRINVANLAEEGLGNIRANSFGYDSAAIKLRIHKLSKTLD

SEQ ID NO: 8752 - protein, 51 aa, synthetic construct
ILTHDSSIRYLQEIYNSNNQKIVNLKEKVAQLEAQCQEPCKDTVQIHDITG

SEQ ID NO: 8753 - protein, 57 aa, synthetic construct
KRSVKNPYPISFLLSDLINRRTQRVDGQPMIGMSSQVEEVRVYEDTEELPGDPDMIR

SEQ ID NO: 8754 - protein, 58 aa, synthetic construct
CYGKKYGPKGKGKGMGAGTLSTDKGESLGIKYEEGQSHRPTNPNASRMAQKVGGSDGC

SEQ ID NO: 8755 - protein, 19 aa, synthetic construct
VPSERGLQRRRFVQNALNG

SEQ ID NO: 8756 - protein, 15 aa, synthetic construct
LLAPTRIYVKSVLEL

SEQ ID NO: 8757 - protein, 19 aa, synthetic construct
VSPVASFNTLQLGERGNIV

SEQ ID NO: 8758 - protein, 21 aa, synthetic construct
TEEPGAPLTTPPTLHGNQARA

SEQ ID NO: 8759 - protein, 34 aa, synthetic construct
GYETIPLALPAFFPAPDNRGVEAPYRKEQRLGSA

SEQ ID NO: 8760 - protein, 22 aa, synthetic construct
DVHNFSIKDVGTIITNKTGVSP

SEQ ID NO: 8761 - protein, 21 aa, synthetic construct
GECLKCIYNTAGFYCDRCKEG

SEQ ID NO: 8762 - protein, 30 aa, synthetic construct
QMALHANVTGAMNYTWATCTINTHAPRSML

SEQ ID NO: 8763 - protein, 25 aa, synthetic construct
PPEATQNVAESTHNLTRNFPADLFN

SEQ ID NO: 8764 - protein, 35 aa, synthetic construct
AGSVAETLKDNTQSKLTVKGNLDTYGFCDDVWTFI

SEQ ID NO: 8765 - protein, 32 aa, synthetic construct
YVREEVFTNNADVVAEKALKPESDITFSKQTA

SEQ ID NO: 8766 - protein, 33 aa, synthetic construct
TCHHRSPLSLTPPKCGSCHTKEIDAADPGRPNL

SEQ ID NO: 8767 - protein, 34 aa, synthetic construct
LDTTAENQAKNEHLQKENERLLRDWNDVQGRFEK

SEQ ID NO: 8768 - protein, 34 aa, synthetic construct
AQAERQRILERTNEGRQEAMAKGVVFGRKRKIDR

SEQ ID NO: 8769 - protein, 35 aa, synthetic construct
GVTPSTTALPDIVNLSTNYLDKNTREDRIHSIKDF

SEQ ID NO: 8770 - protein, 39 aa, synthetic construct
TKLPEAQQRVGGCFLNLMPQMKTLYLTYCANHPSAVNVL

SEQ ID NO: 8771 - protein, 85 aa, synthetic construct
GGSWCIFVYNLSPDSDESVLWQLFGPFGAVNNVKVIRDFNTNKCKGFGFVTMTNYDEAAMAIASLNGYRLGDRVLQVSFKTNGGS

SEQ ID NO: 8772 - protein, 62 aa, synthetic construct
AGSKPFGKSKGFGFVCFSSPDEASKAVTEMNQRMVNGKPLYVALAQRKDVRRSQLEASIGSA

SEQ ID NO: 8773 - protein, 11 aa, synthetic construct
SGGSSGGSSGS

SEQ ID NO: 8774 - RNA, 19 nt, synthetic construct
  source 1..19: mol_type = other RNA
tgggcagggcagggtggga

SEQ ID NO: 8775 - RNA, 54 nt, synthetic construct
  source 1..54: mol_type = other RNA
gtttaagagctagaaatagcaagtttaaataaggctagtccgttatcagcgtga

SEQ ID NO: 8776 - RNA, 22 nt, synthetic construct
  source 1..22: mol_type = other RNA
aaacgcggcaccgagtcggtgc

SEQ ID NO: 8777 - protein, 16 aa, synthetic construct
RQIKIWFQNRRMKWKK

SEQ ID NO: 8778 - protein, 9 aa, synthetic construct
RRRRRRRRR

SEQ ID NO: 8779 - protein, 8 aa, synthetic construct
RRRRRRRR

SEQ ID NO: 8780 - protein, 219 aa, synthetic construct
SGGSSGGSSGSPDRVRAVSHWSSGGSKRTADGSEFESPKKKRKVATNFSLLKQAGDVEENPGPKRTADGSEFESPKKKRKVGGSQVQLVESGGGLVQPGGSLTLSCTASGFTLDHYDIGWFRQAPGKEREGVSCINNSDDDTYYADSVKGRFTIFNNAKDTVYLQMNSLKPEDTAIYYCAEARGCKRGRYEYDFWGQGTQVTVSSKKKSGGSSGGSSGS

SEQ ID NO: 8781 - protein, 21 aa, synthetic construct
GGSKRTADGSEFESPKKKRKV

SEQ ID NO: 8782 - protein, 215 aa, synthetic construct
SGGSSGGSSGSQVQLVESGGGLVQPGGSLTLSCTASGFTLDHYDIGWFRQAPGKEREGVSCINNSDDDTYYADSVKGRFTIFNNAKDTVYLQMNSLKPEDTAIYYCAEARGCKRGRYEYDFWGQGTQVTVSSKKKKRTADGSEFESPKKKRKVATNFSLLKQAGDVEENPGPKRTADGSEFESPKKKRKVGGSPDRVRAVSHWSSGGSSGGSSGS

SEQ ID NO: 8783 - protein, 215 aa, synthetic construct
SGGSSGGSSGSQVQLVESGGGLVQPGGSLTLSCTASGFTLDHYDIGWFRQAPGKEREGVSCINNSDDDTYYADSVKGRFTIFNNAKDTVYLQMNSLKPEDTAIYYCAEARGCKRGRYEYDFWGQGTQVTVSSKKKKRTADGSEFESPKKKRKVATNFSLLKQAGDVEENPGPKRTADGSEFESPKKKRKVGGSPDRKAAVSHWQSGGSSGGSSGS

SEQ ID NO: 8784 - protein, 223 aa, synthetic construct
SGGSSGGSSGSPDRRAAVSHWQSGGSSGGSSGSKRTADGSEFESPKKKRKVATNFSLLKQAGDVEENPGPKRTADGSEFESPKKKRKVQVQLVESGGGLVQPGGSLTLSCTASGFTLDHYDIGWFRQAPGKEREGVSCINNSDDDTYYADSVKGRFTIFNNAKDTVYLQMNSLKPEDTAIYYCAEARGCKRGRYEYDFWGQGTQVTVSSKKKSGGSSGGSSGS
